United States Patent Application Publication US 2026/0275356 A1, published September 17, 2026 (application 19/168,351).

The application's sequence listing, which the Patent Office published only in electronic form, follows.

SEQUENCE LISTING (1306 sequences)

SEQ ID NO: 1 - RNA, 101 nt, Homo sapiens
  source 1..101: mol_type = mRNA
  misc_feature 1..101: note = Target Sequence Human
caaggctcacttatggaagcctaaagggctggccatcgccctggtggcacagtatggcatcatgcccctcacggcctttgtgctgggcaaggtcttccggc

SEQ ID NO: 2 - RNA, 101 nt, Homo sapiens
  source 1..101: mol_type = mRNA
  misc_feature 1..101: note = Target Sequence Human
ctgcctcaatggacggtgcagacgcactgtcagcatggagactggatgccaaaatgtccaactctgttccaccatcctcaatgtggcctttccacctgaag

SEQ ID NO: 3 - RNA, 101 nt, Homo sapiens
  source 1..101: mol_type = mRNA
  misc_feature 1..101: note = Target Sequence Human
ctctgctctcttctgcctcaatggacggtgcagacgcactgtcagcatggagactggatgccaaaatgtccaactctgttccaccatcctcaatgtggcct

SEQ ID NO: 4 - RNA, 101 nt, Homo sapiens
  source 1..101: mol_type = mRNA
  misc_feature 1..101: note = Target Sequence Human
ggcttctcctcattgccatattttggtgctatgagaaattcaagactcccaaggataaaacaaaaatgatctacacagctgccacaactgaagaaacaatt

SEQ ID NO: 5 - DNA, 32 bp, synthetic construct
  source 1..32: mol_type = other DNA
  misc_feature 19..20: note = DNA
  misc_feature order(1..18,21..32): note = RNA
  modified_base 1..5: mod_base = OTHER; note = 2-Prime-O-Methoxyethyl modified nucleoside
  modified_base order(18,23): mod_base = OTHER; note = 2-Prime-O-Methoxyethyl modified 5-methyl Cytidine
  modified_base 19: mod_base = OTHER; note = DNA nucleotide carrying a 6-amino-5-nitro-3-yl-2(1H)-pyridone nucleobase
  modified_base 20: mod_base = OTHER; note = DNA nucleotide carrying a hypoxanthine nucleobase
  modified_base order(12..17,22,24..29): mod_base = OTHER; note = 2-Prime-Fluoro modified nucleoside
  modified_base order(6..11,21,30..32): mod_base = OTHER; note = 2-Prime-O-Methyl modified nucleoside
  modified_base order(1^2,31^32): mod_base = OTHER; note = (1,3-dimethylimidazolidin-2-ylidene) Phosphoramidate linkage
  modified_base order(6..18,19^20,22..31): mod_base = OTHER; note = Phosphorothioate linkage
  modified_base 20^21: mod_base = OTHER; note = Methylphosphonate linkage
  misc_feature 1..32: note = T1-01
aggggcatgatgccatacnntgccaccagggc

SEQ ID NO: 6 - DNA, 32 bp, synthetic construct; identical to SEQ ID NO: 5
  source 1..32: mol_type = other DNA
  misc_feature 19..20: note = DNA
  misc_feature order(1..18,21..32): note = RNA
  modified_base 1..5: mod_base = OTHER; note = 2-Prime-O-Methoxyethyl modified nucleoside
  modified_base order(18,23): mod_base = OTHER; note = 2-Prime-O-Methoxyethyl modified 5-methyl Cytidine
  modified_base 19: mod_base = OTHER; note = DNA nucleotide carrying a 6-amino-5-nitro-3-yl-2(1H)-pyridone nucleobase
  modified_base 20: mod_base = OTHER; note = DNA nucleotide carrying a hypoxanthine nucleobase
  modified_base order(13,15,17,22,24,26,28): mod_base = OTHER; note = 2-Prime-Fluoro modified nucleoside
  modified_base order(6..12,14,16,21,25,27,29..32): mod_base = OTHER; note = 2-Prime-O-Methyl modified nucleoside
  modified_base order(1^2,31^32): mod_base = OTHER; note = (1,3-dimethylimidazolidin-2-ylidene) Phosphoramidate linkage
  modified_base order(6..18,19^20,22..31): mod_base = OTHER; note = Phosphorothioate linkage
  modified_base 20^21: mod_base = OTHER; note = Methylphosphonate linkage
  misc_feature 1..32: note = T1-02

SEQ ID NO: 7 - DNA, 32 bp, synthetic construct; identical to SEQ ID NO: 5
  source 1..32: mol_type = other DNA
  misc_feature 19..20: note = DNA
  misc_feature order(1..18,21..32): note = RNA
  modified_base 1..5: mod_base = OTHER; note = 2-Prime-O-Methoxyethyl modified nucleoside
  modified_base order(18,23): mod_base = OTHER; note = 2-Prime-O-Methoxyethyl modified 5-methyl Cytidine
  modified_base 19: mod_base = OTHER; note = DNA nucleotide carrying a 6-amino-5-nitro-3-yl-2(1H)-pyridone nucleobase
  modified_base 20: mod_base = OTHER; note = DNA nucleotide carrying a hypoxanthine nucleobase
  modified_base order(12..17,22,24..29): mod_base = OTHER; note = 2-Prime-Fluoro modified nucleoside
  modified_base order(6..11,21,30..32): mod_base = OTHER; note = 2-Prime-O-Methyl modified nucleoside
  modified_base order(1^2,31^32): mod_base = OTHER; note = (1,3-dimethylimidazolidin-2-ylidene) Phosphoramidate linkage
  modified_base order(6..20,21..31): mod_base = OTHER; note = Phosphorothioate linkage
  modified_base 20^21: mod_base = OTHER; note = Methylphosphonate linkage
  misc_feature 1..32: note = T1-03

SEQ ID NO: 8 - DNA, 32 bp, synthetic construct; identical to SEQ ID NO: 5
  source 1..32: mol_type = other DNA
  misc_feature 19..20: note = DNA
  misc_feature order(1..18,21..32): note = RNA
  modified_base 1..5: mod_base = OTHER; note = 2-Prime-O-Methoxyethyl modified nucleoside
  modified_base order(18,23): mod_base = OTHER; note = 2-Prime-O-Methoxyethyl modified 5-methyl Cytidine
  modified_base 19: mod_base = OTHER; note = DNA nucleotide carrying a 6-amino-5-nitro-3-yl-2(1H)-pyridone nucleobase
  modified_base 20: mod_base = OTHER; note = DNA nucleotide carrying a hypoxanthine nucleobase
  modified_base order(13,15,17,22,24,26,28): mod_base = OTHER; note = 2-Prime-Fluoro modified nucleoside
  modified_base order(6..12,14,16,21,25,27,29..32): mod_base = OTHER; note = 2-Prime-O-Methyl modified nucleoside
  modified_base order(1^2,31^32): mod_base = OTHER; note = (1,3-dimethylimidazolidin-2-ylidene) Phosphoramidate linkage
  modified_base order(6..20,21..31): mod_base = OTHER; note = Phosphorothioate linkage
  modified_base 20^21: mod_base = OTHER; note = Methylphosphonate linkage
  misc_feature 1..32: note = T1-04

SEQ ID NO: 9 - DNA, 30 bp, synthetic construct
  source 1..30: mol_type = other DNA
  misc_feature 17..18: note = DNA
  misc_feature order(1..16,19..30): note = RNA
  modified_base order(1..3,5): mod_base = OTHER; note = 2-Prime-O-Methoxyethyl modified nucleoside
  modified_base order(4,16,21): mod_base = OTHER; note = 2-Prime-O-Methoxyethyl modified 5-methyl Cytidine
  modified_base 17: mod_base = OTHER; note = DNA nucleotide carrying a 6-amino-5-nitro-3-yl-2(1H)-pyridone nucleobase
  modified_base 18: mod_base = OTHER; note = DNA nucleotide carrying a hypoxanthine nucleobase
  modified_base order(10..15,20,22..27): mod_base = OTHER; note = 2-Prime-Fluoro modified nucleoside
  modified_base order(6..9,19,28..30): mod_base = OTHER; note = 2-Prime-O-Methyl modified nucleoside
  modified_base order(1^2,29^30): mod_base = OTHER; note = (1,3-dimethylimidazolidin-2-ylidene) Phosphoramidate linkage
  modified_base order(6..16,17^18,20..29): mod_base = OTHER; note = Phosphorothioate linkage
  modified_base 18^19: mod_base = OTHER; note = Methylphosphonate linkage
  misc_feature 1..30: note = T1-05
gggcatgatgccatacnntgccaccagggc

SEQ ID NO: 10 - DNA, 30 bp, synthetic construct; identical to SEQ ID NO: 9
  source 1..30: mol_type = other DNA
  misc_feature 17..18: note = DNA
  misc_feature order(1..16,19..30): note = RNA
  modified_base order(1..3,5): mod_base = OTHER; note = 2-Prime-O-Methoxyethyl modified nucleoside
  modified_base order(4,16,21): mod_base = OTHER; note = 2-Prime-O-Methoxyethyl modified 5-methyl Cytidine
  modified_base 17: mod_base = OTHER; note = DNA nucleotide carrying a 6-amino-5-nitro-3-yl-2(1H)-pyridone nucleobase
  modified_base 18: mod_base = OTHER; note = DNA nucleotide carrying a hypoxanthine nucleobase
  modified_base order(11,13,15,20,22,24,26): mod_base = OTHER; note = 2-Prime-Fluoro modified nucleoside
  modified_base order(6..10,12,14,19,23,25,27..30): mod_base = OTHER; note = 2-Prime-O-Methyl modified nucleoside
  modified_base order(1^2,29^30): mod_base = OTHER; note = (1,3-dimethylimidazolidin-2-ylidene) Phosphoramidate linkage
  modified_base order(6..16,17^18,20..29): mod_base = OTHER; note = Phosphorothioate linkage
  modified_base 18^19: mod_base = OTHER; note = Methylphosphonate linkage
  misc_feature 1..30: note = T1-06

SEQ ID NO: 11 - DNA, 30 bp, synthetic construct; identical to SEQ ID NO: 9
  source 1..30: mol_type = other DNA
  misc_feature 17..18: note = DNA
  misc_feature order(1..16,19..30): note = RNA
  modified_base order(1..3,5): mod_base = OTHER; note = 2-Prime-O-Methoxyethyl modified nucleoside
  modified_base order(4,16,21): mod_base = OTHER; note = 2-Prime-O-Methoxyethyl modified 5-methyl Cytidine
  modified_base 17: mod_base = OTHER; note = DNA nucleotide carrying a 6-amino-5-nitro-3-yl-2(1H)-pyridone nucleobase
  modified_base 18: mod_base = OTHER; note = DNA nucleotide carrying a hypoxanthine nucleobase
  modified_base order(10..15,20,22..27): mod_base = OTHER; note = 2-Prime-Fluoro modified nucleoside
  modified_base order(6..9,19,28..30): mod_base = OTHER; note = 2-Prime-O-Methyl modified nucleoside
  modified_base order(1^2,29^30): mod_base = OTHER; note = (1,3-dimethylimidazolidin-2-ylidene) Phosphoramidate linkage
  modified_base order(6..18,19..29): mod_base = OTHER; note = Phosphorothioate linkage
  modified_base 18^19: mod_base = OTHER; note = Methylphosphonate linkage
  misc_feature 1..30: note = T1-07

SEQ ID NO: 12 - DNA, 30 bp, synthetic construct; identical to SEQ ID NO: 9
  source 1..30: mol_type = other DNA
  misc_feature 17..18: note = DNA
  misc_feature order(1..16,19..30): note = RNA
  modified_base order(1..3,5): mod_base = OTHER; note = 2-Prime-O-Methoxyethyl modified nucleoside
  modified_base order(4,16,21): mod_base = OTHER; note = 2-Prime-O-Methoxyethyl modified 5-methyl Cytidine
  modified_base 17: mod_base = OTHER; note = DNA nucleotide carrying a 6-amino-5-nitro-3-yl-2(1H)-pyridone nucleobase
  modified_base 18: mod_base = OTHER; note = DNA nucleotide carrying a hypoxanthine nucleobase
  modified_base order(11,13,15,20,22,24,26): mod_base = OTHER; note = 2-Prime-Fluoro modified nucleoside
  modified_base order(6..10,12,14,19,23,25,27..30): mod_base = OTHER; note = 2-Prime-O-Methyl modified nucleoside
  modified_base order(1^2,29^30): mod_base = OTHER; note = (1,3-dimethylimidazolidin-2-ylidene) Phosphoramidate linkage
  modified_base order(6..18,19..29): mod_base = OTHER; note = Phosphorothioate linkage
  modified_base 18^19: mod_base = OTHER; note = Methylphosphonate linkage
  misc_feature 1..30: note = T1-08

SEQ ID NO: 13 - DNA, 28 bp, synthetic construct
  source 1..28: mol_type = other DNA
  misc_feature 15..16: note = DNA
  misc_feature order(1..14,17..28): note = RNA
  modified_base order(1,3,5): mod_base = OTHER; note = 2-Prime-O-Methoxyethyl modified nucleoside
  modified_base order(2,14,19): mod_base = OTHER; note = 2-Prime-O-Methoxyethyl modified 5-methyl Cytidine
  modified_base 4: mod_base = OTHER; note = 2-Prime-O-Methoxyethyl modified 5-methyl Uridine
  modified_base 15: mod_base = OTHER; note = DNA nucleotide carrying a 6-amino-5-nitro-3-yl-2(1H)-pyridone nucleobase
  modified_base 16: mod_base = OTHER; note = DNA nucleotide carrying a hypoxanthine nucleobase
  modified_base order(8..13,18,20..25): mod_base = OTHER; note = 2-Prime-Fluoro modified nucleoside
  modified_base order(6..7,17,26..28): mod_base = OTHER; note = 2-Prime-O-Methyl modified nucleoside
  modified_base order(1^2,27^28): mod_base = OTHER; note = (1,3-dimethylimidazolidin-2-ylidene) Phosphoramidate linkage
  modified_base order(6..14,15^16,18..27): mod_base = OTHER; note = Phosphorothioate linkage
  modified_base 16^17: mod_base = OTHER; note = Methylphosphonate linkage
  misc_feature 1..28: note = T1-09
gcatgatgccatacnntgccaccagggc

SEQ ID NO: 14 - DNA, 28 bp, synthetic construct
  source 1..28: mol_type = other DNA
  misc_feature 15..16: note = DNA
  misc_feature order(1..14,17..28): note = RNA
  modified_base order(1,3,5): mod_base = OTHER; note = 2-Prime-O-Methoxyethyl modified nucleoside
  modified_base order(2,14,19): mod_base = OTHER; note = 2-Prime-O-Methoxyethyl modified 5-methyl Cytidine
  modified_base 4: mod_base = OTHER; note = 2-Prime-O-Methoxyethyl modified 5-methyl Uridine
  modified_base 15: mod_base = OTHER; note = DNA nucleotide carrying a 6-amino-5-nitro-3-yl-2(1H)-pyridone nucleobase
  modified_base 16: mod_base = OTHER; note = DNA nucleotide carrying a hypoxanthine nucleobase
  modified_base order(9,11,13,18,20,22,24): mod_base = OTHER; note = 2-Prime-Fluoro modified nucleoside
  modified_base order(6..8,10,12,17,21,23,25..28): mod_base = OTHER; note = 2-Prime-O-Methyl modified nucleoside
  modified_base order(1^2,27^28): mod_base = OTHER; note = (1,3-dimethylimidazolidin-2-ylidene) Phosphoramidate linkage
  modified_base order(6..14,15^16,18..27): mod_base = OTHER; note = Phosphorothioate linkage
  modified_base 16^17: mod_base = OTHER; note = Methylphosphonate linkage
  misc_feature 1..28: note = T1-10
gcatgatgccatacnntgccaccagggc

SEQ ID NO: 15 - DNA, 28 bp, synthetic construct
  source 1..28: mol_type = other DNA
  misc_feature 15..16: note = DNA
  misc_feature order(1..14,17..28): note = RNA
  modified_base order(1,3,5): mod_base = OTHER; note = 2-Prime-O-Methoxyethyl modified nucleoside
  modified_base order(2,14,19): mod_base = OTHER; note = 2-Prime-O-Methoxyethyl modified 5-methyl Cytidine
  modified_base 4: mod_base = OTHER; note = 2-Prime-O-Methoxyethyl modified 5-methyl Uridine
  modified_base 15: mod_base = OTHER; note = DNA nucleotide carrying a 6-amino-5-nitro-3-yl-2(1H)-pyridone nucleobase
  modified_base 16: mod_base = OTHER; note = DNA nucleotide carrying a hypoxanthine nucleobase
  modified_base order(8..13,18,20..25): mod_base = OTHER; note = 2-Prime-Fluoro modified nucleoside
  modified_base order(6..7,17,26..28): mod_base = OTHER; note = 2-Prime-O-Methyl modified nucleoside
  modified_base order(1^2,27^28): mod_base = OTHER; note = (1,3-dimethylimidazolidin-2-ylidene) Phosphoramidate linkage
  modified_base order(6..16,17..27): mod_base = OTHER; note = Phosphorothioate linkage
  modified_base 16^17: mod_base = OTHER; note = Methylphosphonate linkage
  misc_feature 1..28: note = T1-11
gcatgatgccatacnntgccaccagggc

SEQ ID NO: 16 - DNA, 28 bp, synthetic construct
  source 1..28: mol_type = other DNA
  misc_feature 15..16: note = DNA
  misc_feature order(1..14,17..28): note = RNA
  modified_base order(1,3,5): mod_base = OTHER; note = 2-Prime-O-Methoxyethyl modified nucleoside
  modified_base order(2,14,19): mod_base = OTHER; note = 2-Prime-O-Methoxyethyl modified 5-methyl Cytidine
  modified_base 4: mod_base = OTHER; note = 2-Prime-O-Methoxyethyl modified 5-methyl Uridine
  modified_base 15: mod_base = OTHER; note = DNA nucleotide carrying a 6-amino-5-nitro-3-yl-2(1H)-pyridone nucleobase
  modified_base 16: mod_base = OTHER; note = DNA nucleotide carrying a hypoxanthine nucleobase
  modified_base order(9,11,13,18,20,22,24): mod_base = OTHER; note = 2-Prime-Fluoro modified nucleoside
  modified_base order(6..8,10,12,17,21,23,25..28): mod_base = OTHER; note = 2-Prime-O-Methyl modified nucleoside
  modified_base order(1^2,27^28): mod_base = OTHER; note = (1,3-dimethylimidazolidin-2-ylidene) Phosphoramidate linkage
  modified_base order(6..16,17..27): mod_base = OTHER; note = Phosphorothioate linkage
  modified_base 16^17: mod_base = OTHER; note = Methylphosphonate linkage
  misc_feature 1..28: note = T1-12
gcatgatgccatacnntgccaccagggc

SEQ ID NO: 17 - DNA, 26 bp, synthetic construct
  source 1..26: mol_type = other DNA
  misc_feature 13..14: note = DNA
  misc_feature order(1..12,15..26): note = RNA
  modified_base order(1,3): mod_base = OTHER; note = 2-Prime-O-Methoxyethyl modified nucleoside
  modified_base order(12,17): mod_base = OTHER; note = 2-Prime-O-Methoxyethyl modified 5-methyl Cytidine
  modified_base 2: mod_base = OTHER; note = 2-Prime-O-Methoxyethyl modified 5-methyl Uridine
  modified_base 13: mod_base = OTHER; note = DNA nucleotide carrying a 6-amino-5-nitro-3-yl-2(1H)-pyridone nucleobase
  modified_base 14: mod_base = OTHER; note = DNA nucleotide carrying a hypoxanthine nucleobase
  modified_base order(6..11,16,18..23): mod_base = OTHER; note = 2-Prime-Fluoro modified nucleoside
  modified_base order(4..5,15,24..26): mod_base = OTHER; note = 2-Prime-O-Methyl modified nucleoside
  modified_base order(1^2,25^26): mod_base = OTHER; note = (1,3-dimethylimidazolidin-2-ylidene) Phosphoramidate linkage
  modified_base order(4..12,13^14,16..25): mod_base = OTHER; note = Phosphorothioate linkage
  modified_base 14^15: mod_base = OTHER; note = Methylphosphonate linkage
  misc_feature 1..26: note = T1-13
atgatgccatacnntgccaccagggc

SEQ ID NO: 18 - DNA, 26 bp, synthetic construct
  source 1..26: mol_type = other DNA
  misc_feature 13..14: note = DNA
  misc_feature order(1..12,15..26): note = RNA
  modified_base order(1,3): mod_base = OTHER; note = 2-Prime-O-Methoxyethyl modified nucleoside
  modified_base order(12,17): mod_base = OTHER; note = 2-Prime-O-Methoxyethyl modified 5-methyl Cytidine
  modified_base 2: mod_base = OTHER; note = 2-Prime-O-Methoxyethyl modified 5-methyl Uridine
  modified_base 13: mod_base = OTHER; note = DNA nucleotide carrying a 6-amino-5-nitro-3-yl-2(1H)-pyridone nucleobase
  modified_base 14: mod_base = OTHER; note = DNA nucleotide carrying a hypoxanthine nucleobase
  modified_base order(7,9,11,16,18,20,22): mod_base = OTHER; note = 2-Prime-Fluoro modified nucleoside
  modified_base order(4..6,8,10,15,19,21,23..26): mod_base = OTHER; note = 2-Prime-O-Methyl modified nucleoside
  modified_base order(1^2,25^26): mod_base = OTHER; note = (1,3-dimethylimidazolidin-2-ylidene) Phosphoramidate linkage
  modified_base order(4..12,13^14,16..25): mod_base = OTHER; note = Phosphorothioate linkage
  modified_base 14^15: mod_base = OTHER; note = Methylphosphonate linkage
  misc_feature 1..26: note = T1-14
atgatgccatacnntgccaccagggc

SEQ ID NO: 19 - DNA, 26 bp, synthetic construct
  source 1..26: mol_type = other DNA
  misc_feature 13..14: note = DNA
  misc_feature order(1..12,15..26): note = RNA
  modified_base order(1,3): mod_base = OTHER; note = 2-Prime-O-Methoxyethyl modified nucleoside
  modified_base order(12,17): mod_base = OTHER; note = 2-Prime-O-Methoxyethyl modified 5-methyl Cytidine
  modified_base 2: mod_base = OTHER; note = 2-Prime-O-Methoxyethyl modified 5-methyl Uridine
  modified_base 13: mod_base = OTHER; note = DNA nucleotide carrying a 6-amino-5-nitro-3-yl-2(1H)-pyridone nucleobase
  modified_base 14: mod_base = OTHER; note = DNA nucleotide carrying a hypoxanthine nucleobase
  modified_base order(6..11,16,18..23): mod_base = OTHER; note = 2-Prime-Fluoro modified nucleoside
  modified_base order(4..5,15,24..26): mod_base = OTHER; note = 2-Prime-O-Methyl modified nucleoside
  modified_base order(1^2,25^26): mod_base = OTHER; note = (1,3-dimethylimidazolidin-2-ylidene) Phosphoramidate linkage
  modified_base order(4..14,15..25): mod_base = OTHER; note = Phosphorothioate linkage
  modified_base 14^15: mod_base = OTHER; note = Methylphosphonate linkage
  misc_feature 1..26: note = T1-15
atgatgccatacnntgccaccagggc

SEQ ID NO: 20 - DNA, 26 bp, synthetic construct
  source 1..26: mol_type = other DNA
  misc_feature 13..14: note = DNA
  misc_feature order(1..12,15..26): note = RNA
  modified_base order(1,3): mod_base = OTHER; note = 2-Prime-O-Methoxyethyl modified nucleoside
  modified_base order(12,17): mod_base = OTHER; note = 2-Prime-O-Methoxyethyl modified 5-methyl Cytidine
  modified_base 2: mod_base = OTHER; note = 2-Prime-O-Methoxyethyl modified 5-methyl Uridine
  modified_base 13: mod_base = OTHER; note = DNA nucleotide carrying a 6-amino-5-nitro-3-yl-2(1H)-pyridone nucleobase
  modified_base 14: mod_base = OTHER; note = DNA nucleotide carrying a hypoxanthine nucleobase
  modified_base order(7,9,11,16,18,20,22): mod_base = OTHER; note = 2-Prime-Fluoro modified nucleoside
  modified_base order(4..6,8,10,15,19,21,23..26): mod_base = OTHER; note = 2-Prime-O-Methyl modified nucleoside
  modified_base order(1^2,25^26): mod_base = OTHER; note = (1,3-dimethylimidazolidin-2-ylidene) Phosphoramidate linkage
  modified_base order(4..14,15..25): mod_base = OTHER; note = Phosphorothioate linkage
  modified_base 14^15: mod_base = OTHER; note = Methylphosphonate linkage
  misc_feature 1..26: note = T1-16
atgatgccatacnntgccaccagggc

SEQ ID NO: 21 - DNA, 30 bp, synthetic construct
  source 1..30: mol_type = other DNA
  misc_feature 19..20: note = DNA
  misc_feature order(1..18,21..30): note = RNA
  modified_base 1..5: mod_base = OTHER; note = 2-Prime-O-Methoxyethyl modified nucleoside
  modified_base order(18,23): mod_base = OTHER; note = 2-Prime-O-Methoxyethyl modified 5-methyl Cytidine
  modified_base 19: mod_base = OTHER; note = DNA nucleotide carrying a 6-amino-5-nitro-3-yl-2(1H)-pyridone nucleobase
  modified_base 20: mod_base = OTHER; note = DNA nucleotide carrying a hypoxanthine nucleobase
  modified_base order(12..17,22,24..29): mod_base = OTHER; note = 2-Prime-Fluoro modified nucleoside
  modified_base order(6..11,21,30): mod_base = OTHER; note = 2-Prime-O-Methyl modified nucleoside
  modified_base order(1^2,29^30): mod_base = OTHER; note = (1,3-dimethylimidazolidin-2-ylidene) Phosphoramidate linkage
  modified_base order(6..18,19^20,22..29): mod_base = OTHER; note = Phosphorothioate linkage
  modified_base 20^21: mod_base = OTHER; note = Methylphosphonate linkage
  misc_feature 1..30: note = T1-17
aggggcatgatgccatacnntgccaccagg

SEQ ID NO: 22 - DNA, 30 bp, synthetic construct; identical to SEQ ID NO: 21
  source 1..30: mol_type = other DNA
  misc_feature 19..20: note = DNA
  misc_feature order(1..18,21..30): note = RNA
  modified_base 1..5: mod_base = OTHER; note = 2-Prime-O-Methoxyethyl modified nucleoside
  modified_base order(18,23): mod_base = OTHER; note = 2-Prime-O-Methoxyethyl modified 5-methyl Cytidine
  modified_base 19: mod_base = OTHER; note = DNA nucleotide carrying a 6-amino-5-nitro-3-yl-2(1H)-pyridone nucleobase
  modified_base 20: mod_base = OTHER; note = DNA nucleotide carrying a hypoxanthine nucleobase
  modified_base order(13,15,17,22,24,26,28): mod_base = OTHER; note = 2-Prime-Fluoro modified nucleoside
  modified_base order(6..12,14,16,21,25,27,29..30): mod_base = OTHER; note = 2-Prime-O-Methyl modified nucleoside
  modified_base order(1^2,29^30): mod_base = OTHER; note = (1,3-dimethylimidazolidin-2-ylidene) Phosphoramidate linkage
  modified_base order(6..18,19^20,22..29): mod_base = OTHER; note = Phosphorothioate linkage
  modified_base 20^21: mod_base = OTHER; note = Methylphosphonate linkage
  misc_feature 1..30: note = T1-18

SEQ ID NO: 23 - DNA, 30 bp, synthetic construct; identical to SEQ ID NO: 21
  source 1..30: mol_type = other DNA
  misc_feature 19..20: note = DNA
  misc_feature order(1..18,21..30): note = RNA
  modified_base 1..5: mod_base = OTHER; note = 2-Prime-O-Methoxyethyl modified nucleoside
  modified_base order(18,23): mod_base = OTHER; note = 2-Prime-O-Methoxyethyl modified 5-methyl Cytidine
  modified_base 19: mod_base = OTHER; note = DNA nucleotide carrying a 6-amino-5-nitro-3-yl-2(1H)-pyridone nucleobase
  modified_base 20: mod_base = OTHER; note = DNA nucleotide carrying a hypoxanthine nucleobase
  modified_base order(12..17,22,24..29): mod_base = OTHER; note = 2-Prime-Fluoro modified nucleoside
  modified_base order(6..11,21,30): mod_base = OTHER; note = 2-Prime-O-Methyl modified nucleoside
  modified_base order(1^2,29^30): mod_base = OTHER; note = (1,3-dimethylimidazolidin-2-ylidene) Phosphoramidate linkage
  modified_base order(6..20,21..29): mod_base = OTHER; note = Phosphorothioate linkage
  modified_base 20^21: mod_base = OTHER; note = Methylphosphonate linkage
  misc_feature 1..30: note = T1-19

SEQ ID NO: 24 - DNA, 30 bp, synthetic construct; identical to SEQ ID NO: 21
  source 1..30: mol_type = other DNA
  misc_feature 19..20: note = DNA
  misc_feature order(1..18,21..30): note = RNA
  modified_base 1..5: mod_base = OTHER; note = 2-Prime-O-Methoxyethyl modified nucleoside
  modified_base order(18,23): mod_base = OTHER; note = 2-Prime-O-Methoxyethyl modified 5-methyl Cytidine
  modified_base 19: mod_base = OTHER; note = DNA nucleotide carrying a 6-amino-5-nitro-3-yl-2(1H)-pyridone nucleobase
  modified_base 20: mod_base = OTHER; note = DNA nucleotide carrying a hypoxanthine nucleobase
  modified_base order(13,15,17,22,24,26,28): mod_base = OTHER; note = 2-Prime-Fluoro modified nucleoside
  modified_base order(6..12,14,16,21,25,27,29..30): mod_base = OTHER; note = 2-Prime-O-Methyl modified nucleoside
  modified_base order(1^2,29^30): mod_base = OTHER; note = (1,3-dimethylimidazolidin-2-ylidene) Phosphoramidate linkage
  modified_base order(6..20,21..29): mod_base = OTHER; note = Phosphorothioate linkage
  modified_base 20^21: mod_base = OTHER; note = Methylphosphonate linkage
  misc_feature 1..30: note = T1-20

SEQ ID NO: 25 - DNA, 28 bp, synthetic construct
  source 1..28: mol_type = other DNA
  misc_feature 19..20: note = DNA
  misc_feature order(1..18,21..28): note = RNA
  modified_base 1..5: mod_base = OTHER; note = 2-Prime-O-Methoxyethyl modified nucleoside
  modified_base order(18,23): mod_base = OTHER; note = 2-Prime-O-Methoxyethyl modified 5-methyl Cytidine
  modified_base 19: mod_base = OTHER; note = DNA nucleotide carrying a 6-amino-5-nitro-3-yl-2(1H)-pyridone nucleobase
  modified_base 20: mod_base = OTHER; note = DNA nucleotide carrying a hypoxanthine nucleobase
  modified_base order(12..17,22,24..28): mod_base = OTHER; note = 2-Prime-Fluoro modified nucleoside
  modified_base order(6..11,21): mod_base = OTHER; note = 2-Prime-O-Methyl modified nucleoside
  modified_base order(1^2,27^28): mod_base = OTHER; note = (1,3-dimethylimidazolidin-2-ylidene) Phosphoramidate linkage
  modified_base order(6..18,19^20,22..27): mod_base = OTHER; note = Phosphorothioate linkage
  modified_base 20^21: mod_base = OTHER; note = Methylphosphonate linkage
  misc_feature 1..28: note = T1-21
aggggcatgatgccatacnntgccacca

SEQ ID NO: 26 - DNA, 28 bp, synthetic construct
  source 1..28: mol_type = other DNA
  misc_feature 19..20: note = DNA
  misc_feature order(1..18,21..28): note = RNA
  modified_base 1..5: mod_base = OTHER; note = 2-Prime-O-Methoxyethyl modified nucleoside
  modified_base order(18,23): mod_base = OTHER; note = 2-Prime-O-Methoxyethyl modified 5-methyl Cytidine
  modified_base 19: mod_base = OTHER; note = DNA nucleotide carrying a 6-amino-5-nitro-3-yl-2(1H)-pyridone nucleobase
  modified_base 20: mod_base = OTHER; note = DNA nucleotide carrying a hypoxanthine nucleobase
  modified_base order(13,15,17,22,24,26,28): mod_base = OTHER; note = 2-Prime-Fluoro modified nucleoside
  modified_base order(6..12,14,16,21,25,27): mod_base = OTHER; note = 2-Prime-O-Methyl modified nucleoside
  modified_base order(1^2,27^28): mod_base = OTHER; note = (1,3-dimethylimidazolidin-2-ylidene) Phosphoramidate linkage
  modified_base order(6..18,19^20,22..27): mod_base = OTHER; note = Phosphorothioate linkage
  modified_base 20^21: mod_base = OTHER; note = Methylphosphonate linkage
  misc_feature 1..28: note = T1-22
aggggcatgatgccatacnntgccacca

SEQ ID NO: 27 - DNA, 28 bp, synthetic construct
  source 1..28: mol_type = other DNA
  misc_feature 19..20: note = DNA
  misc_feature order(1..18,21..28): note = RNA
  modified_base 1..5: mod_base = OTHER; note = 2-Prime-O-Methoxyethyl modified nucleoside
  modified_base order(18,23): mod_base = OTHER; note = 2-Prime-O-Methoxyethyl modified 5-methyl Cytidine
  modified_base 19: mod_base = OTHER; note = DNA nucleotide carrying a 6-amino-5-nitro-3-yl-2(1H)-pyridone nucleobase
  modified_base 20: mod_base = OTHER; note = DNA nucleotide carrying a hypoxanthine nucleobase
  modified_base order(12..17,22,24..28): mod_base = OTHER; note = 2-Prime-Fluoro modified nucleoside
  modified_base order(6..11,21): mod_base = OTHER; note = 2-Prime-O-Methyl modified nucleoside
  modified_base order(1^2,27^28): mod_base = OTHER; note = (1,3-dimethylimidazolidin-2-ylidene) Phosphoramidate linkage
  modified_base order(6..20,21..27): mod_base = OTHER; note = Phosphorothioate linkage
  modified_base 20^21: mod_base = OTHER; note = Methylphosphonate linkage
  misc_feature 1..28: note = T1-23
aggggcatgatgccatacnntgccacca

SEQ ID NO: 28 - DNA, 28 bp, synthetic construct
  source 1..28: mol_type = other DNA
  misc_feature 19..20: note = DNA
  misc_feature order(1..18,21..28): note = RNA
  modified_base 1..5: mod_base = OTHER; note = 2-Prime-O-Methoxyethyl modified nucleoside
  modified_base order(18,23): mod_base = OTHER; note = 2-Prime-O-Methoxyethyl modified 5-methyl Cytidine
  modified_base 19: mod_base = OTHER; note = DNA nucleotide carrying a 6-amino-5-nitro-3-yl-2(1H)-pyridone nucleobase
  modified_base 20: mod_base = OTHER; note = DNA nucleotide carrying a hypoxanthine nucleobase
  modified_base order(13,15,17,22,24,26,28): mod_base = OTHER; note = 2-Prime-Fluoro modified nucleoside
  modified_base order(6..12,14,16,21,25,27): mod_base = OTHER; note = 2-Prime-O-Methyl modified nucleoside
  modified_base order(1^2,27^28): mod_base = OTHER; note = (1,3-dimethylimidazolidin-2-ylidene) Phosphoramidate linkage
  modified_base order(6..20,21..27): mod_base = OTHER; note = Phosphorothioate linkage
  modified_base 20^21: mod_base = OTHER; note = Methylphosphonate linkage
  misc_feature 1..28: note = T1-24
aggggcatgatgccatacnntgccacca

SEQ ID NO: 29 - DNA, 30 bp, synthetic construct
  source 1..30: mol_type = other DNA
  misc_feature 24..25: note = DNA
  misc_feature order(1..23,26..30): note = RNA
  modified_base order(23,28): mod_base = OTHER; note = 2-Prime-O-Methoxyethyl modified 5-methyl Cytidine
  modified_base 24: mod_base = OTHER; note = DNA nucleotide carrying a 6-amino-5-nitro-3-yl-2(1H)-pyridone nucleobase
  modified_base 25: mod_base = OTHER; note = DNA nucleotide carrying a hypoxanthine nucleobase
  modified_base order(5..6,9..10,13..14,17..22,27): mod_base = OTHER; note = 2-Prime-Fluoro modified nucleoside
  modified_base order(1..4,7..8,11..12,15..16,26,29..30): mod_base = OTHER; note = 2-Prime-O-Methyl modified nucleoside
  modified_base order(1^2,29^30): mod_base = OTHER; note = (1,3-dimethylimidazolidin-2-ylidene) Phosphoramidate linkage
  modified_base order(2..23,24^25,27..29): mod_base = OTHER; note = Phosphorothioate linkage
  modified_base 25^26: mod_base = OTHER; note = Methylphosphonate linkage
  misc_feature 1..30: note = T1-25
ccgtgaggggcatgatgccatacnntgcca

SEQ ID NO: 30 - DNA, 30 bp, synthetic construct; identical to SEQ ID NO: 29
  source 1..30: mol_type = other DNA
  misc_feature 24..25: note = DNA
  misc_feature order(1..23,26..30): note = RNA
  modified_base order(23,28): mod_base = OTHER; note = 2-Prime-O-Methoxyethyl modified 5-methyl Cytidine
  modified_base 24: mod_base = OTHER; note = DNA nucleotide carrying a 6-amino-5-nitro-3-yl-2(1H)-pyridone nucleobase
  modified_base 25: mod_base = OTHER; note = DNA nucleotide carrying a hypoxanthine nucleobase
  modified_base order(4..5,8..9,11..15,18..19,22,27): mod_base = OTHER; note = 2-Prime-Fluoro modified nucleoside
  modified_base order(1..3,6..7,10,16..17,20..21,26,29..30): mod_base = OTHER; note = 2-Prime-O-Methyl modified nucleoside
  modified_base order(1^2,11^12,14^15,29^30): mod_base = OTHER; note = (1,3-dimethylimidazolidin-2-ylidene) Phosphoramidate linkage
  modified_base order(2..6,8..11,12^13,18..20,21..23,24^25,27..29): mod_base = OTHER; note = Phosphorothioate linkage
  modified_base 25^26: mod_base = OTHER; note = Methylphosphonate linkage
  misc_feature 1..30: note = T1-26

SEQ ID NO: 31 - DNA, 30 bp, synthetic construct; identical to SEQ ID NO: 29
  source 1..30: mol_type = other DNA
  misc_feature 24..25: note = DNA
  misc_feature order(1..23,26..30): note = RNA
  modified_base order(23,28): mod_base = OTHER; note = 2-Prime-O-Methoxyethyl modified 5-methyl Cytidine
  modified_base 24: mod_base = OTHER; note = DNA nucleotide carrying a 6-amino-5-nitro-3-yl-2(1H)-pyridone nucleobase
  modified_base 25: mod_base = OTHER; note = DNA nucleotide carrying a hypoxanthine nucleobase
  modified_base order(4..6,8..9,11,13..15,18..20,22,27): mod_base = OTHER; note = 2-Prime-Fluoro modified nucleoside
  modified_base order(1..3,7,10,12,16..17,21,26,29..30): mod_base = OTHER; note = 2-Prime-O-Methyl modified nucleoside
  modified_base order(1^2,11^12,14^15,29^30): mod_base = OTHER; note = (1,3-dimethylimidazolidin-2-ylidene) Phosphoramidate linkage
  modified_base order(2..6,7..9,10^11,13^14,16..21,22^23,24^25,27..29): mod_base = OTHER; note = Phosphorothioate linkage
  modified_base 25^26: mod_base = OTHER; note = Methylphosphonate linkage
  misc_feature 1..30: note = T1-27

SEQ ID NO: 32 - DNA, 30 bp, synthetic construct; identical to SEQ ID NO: 29
  source 1..30: mol_type = other DNA
  misc_feature 24..25: note = DNA
  misc_feature order(1..23,26..30): note = RNA
  modified_base 6..7: mod_base = OTHER; note = 2-Prime-O-Methoxyethyl modified nucleoside
  modified_base order(23,28): mod_base = OTHER; note = 2-Prime-O-Methoxyethyl modified 5-methyl Cytidine
  modified_base order(16,21): mod_base = OTHER; note = 2-Prime-O-Methoxyethyl modified 5-methyl Uridine
  modified_base 24: mod_base = OTHER; note = DNA nucleotide carrying a 6-amino-5-nitro-3-yl-2(1H)-pyridone nucleobase
  modified_base 25: mod_base = OTHER; note = DNA nucleotide carrying a hypoxanthine nucleobase
  modified_base order(4..5,8..9,13..15,17,19,22,27): mod_base = OTHER; note = 2-Prime-Fluoro modified nucleoside
  modified_base order(1..3,10..12,18,20,26,29..30): mod_base = OTHER; note = 2-Prime-O-Methyl modified nucleoside
  modified_base order(1^2,11^12,14^15,19^20,29^30): mod_base = OTHER; note = (1,3-dimethylimidazolidin-2-ylidene) Phosphoramidate linkage
  modified_base order(2..6,8..10,13^14,16..18,22^23,24^25,27..29): mod_base = OTHER; note = Phosphorothioate linkage
  modified_base 25^26: mod_base = OTHER; note = Methylphosphonate linkage
  misc_feature 1..30: note = T1-28

SEQ ID NO: 33 - DNA, 30 bp, synthetic construct; identical to SEQ ID NO: 29
  source 1..30: mol_type = other DNA
  misc_feature 24..25: note = DNA
  misc_feature order(1..23,26..30): note = RNA
  modified_base order(6..7,10,20): mod_base = OTHER; note = 2-Prime-O-Methoxyethyl modified nucleoside
  modified_base order(23,28): mod_base = OTHER; note = 2-Prime-O-Methoxyethyl modified 5-methyl Cytidine
  modified_base order(16,21): mod_base = OTHER; note = 2-Prime-O-Methoxyethyl modified 5-methyl Uridine
  modified_base 24: mod_base = OTHER; note = DNA nucleotide carrying a 6-amino-5-nitro-3-yl-2(1H)-pyridone nucleobase
  modified_base 25: mod_base = OTHER; note = DNA nucleotide carrying a hypoxanthine nucleobase
  modified_base order(4..5,8..9,11,13..15,17..19,22,27): mod_base = OTHER; note = 2-Prime-Fluoro modified nucleoside
  modified_base order(1..3,12,26,29..30): mod_base = OTHER; note = 2-Prime-O-Methyl modified nucleoside
  modified_base order(1^2,11^12,14^15,19^20,29^30): mod_base = OTHER; note = (1,3-dimethylimidazolidin-2-ylidene) Phosphoramidate linkage
  modified_base order(2..6,8..10,13^14,16..19,22^23,24^25,27..29): mod_base = OTHER; note = Phosphorothioate linkage
  modified_base 25^26: mod_base = OTHER; note = Methylphosphonate linkage
  misc_feature 1..30: note = T1-29

SEQ ID NO: 34 - DNA, 27 bp, synthetic construct
  source 1..27: mol_type = other DNA
  misc_feature 16..17: note = DNA
  misc_feature order(1..15,18..27): note = RNA
  modified_base order(1..2,4,9,12): mod_base = OTHER; note = 2-Prime-O-Methoxyethyl modified nucleoside
  modified_base order(15,20): mod_base = OTHER; note = 2-Prime-O-Methoxyethyl modified 5-methyl Cytidine
  modified_base order(8,13): mod_base = OTHER; note = 2-Prime-O-Methoxyethyl modified 5-methyl Uridine
  modified_base 16: mod_base = OTHER; note = DNA nucleotide carrying a 6-amino-5-nitro-3-yl-2(1H)-pyridone nucleobase
  modified_base 17: mod_base = OTHER; note = DNA nucleotide carrying a hypoxanthine nucleobase
  modified_base order(5..6,14,19,21,23,25): mod_base = OTHER; note = 2-Prime-Fluoro modified nucleoside
  modified_base order(3,7,10..11,18,22,24,26..27): mod_base = OTHER; note = 2-Prime-O-Methyl modified nucleoside
  modified_base order(2^3,5^6,9..12,14..17,18..26): mod_base = OTHER; note = Phosphorothioate linkage
  modified_base order(3^4,6^7,26^27): mod_base = OTHER; note = (1,3-dimethylimidazolidin-2-ylidene) Phosphoramidate linkage
  modified_base 17^18: mod_base = OTHER; note = Methylphosphonate linkage
  misc_feature 1..27: note = T1-30
ggcatgatgccatacnntgccaccagg

SEQ ID NO: 35 - DNA, 32 bp, synthetic construct
  source 1..32: mol_type = other DNA
  misc_feature 19..20: note = DNA
  misc_feature order(1..18,21..32): note = RNA
  modified_base order(1..3,5,23): mod_base = OTHER; note = 2-Prime-O-Methoxyethyl modified nucleoside
  modified_base 4: mod_base = OTHER; note = 2-Prime-O-Methoxyethyl modified 5-methyl Cytidine
  modified_base 18: mod_base = OTHER; note = 2-Prime-O-Methoxyethyl modified 5-methyl Uridine
  modified_base 19: mod_base = OTHER; note = DNA nucleotide carrying a 6-amino-5-nitro-3-yl-2(1H)-pyridone nucleobase
  modified_base 20: mod_base = OTHER; note = DNA nucleotide carrying a hypoxanthine nucleobase
  modified_base order(12..17,22,24..29): mod_base = OTHER; note = 2-Prime-Fluoro modified nucleoside
  modified_base order(6..11,21,30..32): mod_base = OTHER; note = 2-Prime-O-Methyl modified nucleoside
  modified_base order(1^2,31^32): mod_base = OTHER; note = (1,3-dimethylimidazolidin-2-ylidene) Phosphoramidate linkage
  modified_base order(6..18,19^20,22..31): mod_base = OTHER; note = Phosphorothioate linkage
  modified_base 20^21: mod_base = OTHER; note = Methylphosphonate linkage
  misc_feature 1..32: note = T2-01
gaacagagttggacatttnngcatccagtctc

SEQ ID NO: 36 - DNA, 32 bp, synthetic construct; identical to SEQ ID NO: 35
  source 1..32: mol_type = other DNA
  misc_feature 19..20: note = DNA
  misc_feature order(1..18,21..32): note = RNA
  modified_base order(1..3,5,23): mod_base = OTHER; note = 2-Prime-O-Methoxyethyl modified nucleoside
  modified_base 4: mod_base = OTHER; note = 2-Prime-O-Methoxyethyl modified 5-methyl Cytidine
  modified_base 18: mod_base = OTHER; note = 2-Prime-O-Methoxyethyl modified 5-methyl Uridine
  modified_base 19: mod_base = OTHER; note = DNA nucleotide carrying a 6-amino-5-nitro-3-yl-2(1H)-pyridone nucleobase
  modified_base 20: mod_base = OTHER; note = DNA nucleotide carrying a hypoxanthine nucleobase
  modified_base order(13,15,17,22,24,26,28): mod_base = OTHER; note = 2-Prime-Fluoro modified nucleoside
  modified_base order(6..12,14,16,21,25,27,29..32): mod_base = OTHER; note = 2-Prime-O-Methyl modified nucleoside
  modified_base order(1^2,31^32): mod_base = OTHER; note = (1,3-dimethylimidazolidin-2-ylidene) Phosphoramidate linkage
  modified_base order(6..18,19^20,22..31): mod_base = OTHER; note = Phosphorothioate linkage
  modified_base 20^21: mod_base = OTHER; note = Methylphosphonate linkage
  misc_feature 1..32: note = T2-02

SEQ ID NO: 37 - DNA, 32 bp, synthetic construct; identical to SEQ ID NO: 35
  source 1..32: mol_type = other DNA
  misc_feature 19..20: note = DNA
  misc_feature order(1..18,21..32): note = RNA
  modified_base order(1..3,5,23): mod_base = OTHER; note = 2-Prime-O-Methoxyethyl modified nucleoside
  modified_base 4: mod_base = OTHER; note = 2-Prime-O-Methoxyethyl modified 5-methyl Cytidine
  modified_base 18: mod_base = OTHER; note = 2-Prime-O-Methoxyethyl modified 5-methyl Uridine
  modified_base 19: mod_base = OTHER; note = DNA nucleotide carrying a 6-amino-5-nitro-3-yl-2(1H)-pyridone nucleobase
  modified_base 20: mod_base = OTHER; note = DNA nucleotide carrying a hypoxanthine nucleobase
  modified_base order(12..17,22,24..29): mod_base = OTHER; note = 2-Prime-Fluoro modified nucleoside
  modified_base order(6..11,21,30..32): mod_base = OTHER; note = 2-Prime-O-Methyl modified nucleoside
  modified_base order(1^2,31^32): mod_base = OTHER; note = (1,3-dimethylimidazolidin-2-ylidene) Phosphoramidate linkage
  modified_base order(6..20,21..31): mod_base = OTHER; note = Phosphorothioate linkage
  modified_base 20^21: mod_base = OTHER; note = Methylphosphonate linkage
  misc_feature 1..32: note = T2-03

SEQ ID NO: 38 - DNA, 32 bp, synthetic construct; identical to SEQ ID NO: 35
  source 1..32: mol_type = other DNA
  misc_feature 19..20: note = DNA
  misc_feature order(1..18,21..32): note = RNA
  modified_base order(1..3,5,23): mod_base = OTHER; note = 2-Prime-O-Methoxyethyl modified nucleoside
  modified_base 4: mod_base = OTHER; note = 2-Prime-O-Methoxyethyl modified 5-methyl Cytidine
  modified_base 18: mod_base = OTHER; note = 2-Prime-O-Methoxyethyl modified 5-methyl Uridine
  modified_base 19: mod_base = OTHER; note = DNA nucleotide carrying a 6-amino-5-nitro-3-yl-2(1H)-pyridone nucleobase
  modified_base 20: mod_base = OTHER; note = DNA nucleotide carrying a hypoxanthine nucleobase
  modified_base order(13,15,17,22,24,26,28): mod_base = OTHER; note = 2-Prime-Fluoro modified nucleoside
  modified_base order(6..12,14,16,21,25,27,29..32): mod_base = OTHER; note = 2-Prime-O-Methyl modified nucleoside
  modified_base order(1^2,31^32): mod_base = OTHER; note = (1,3-dimethylimidazolidin-2-ylidene) Phosphoramidate linkage
  modified_base order(6..20,21..31): mod_base = OTHER; note = Phosphorothioate linkage
  modified_base 20^21: mod_base = OTHER; note = Methylphosphonate linkage
  misc_feature 1..32: note = T2-04

SEQ ID NO: 39 - DNA, 30 bp, synthetic construct
  source 1..30: mol_type = other DNA
  misc_feature 17..18: note = DNA
  misc_feature order(1..16,19..30): note = RNA
  modified_base order(1,3..5,21): mod_base = OTHER; note = 2-Prime-O-Methoxyethyl modified nucleoside
  modified_base 2: mod_base = OTHER; note = 2-Prime-O-Methoxyethyl modified 5-methyl Cytidine
  modified_base 16: mod_base = OTHER; note = 2-Prime-O-Methoxyethyl modified 5-methyl Uridine
  modified_base 17: mod_base = OTHER; note = DNA nucleotide carrying a 6-amino-5-nitro-3-yl-2(1H)-pyridone nucleobase
  modified_base 18: mod_base = OTHER; note = DNA nucleotide carrying a hypoxanthine nucleobase
  modified_base order(10..15,20,22..27): mod_base = OTHER; note = 2-Prime-Fluoro modified nucleoside
  modified_base order(6..9,19,28..30): mod_base = OTHER; note = 2-Prime-O-Methyl modified nucleoside
  modified_base order(1^2,29^30): mod_base = OTHER; note = (1,3-dimethylimidazolidin-2-ylidene) Phosphoramidate linkage
  modified_base order(6..16,17^18,20..29): mod_base = OTHER; note = Phosphorothioate linkage
  modified_base 18^19: mod_base = OTHER; note = Methylphosphonate linkage
  misc_feature 1..30: note = T2-05
acagagttggacatttnngcatccagtctc

SEQ ID NO: 40 - DNA, 30 bp, synthetic construct; identical to SEQ ID NO: 39
  source 1..30: mol_type = other DNA
  misc_feature 17..18: note = DNA
  misc_feature order(1..16,19..30): note = RNA
  modified_base order(1,3..5,21): mod_base = OTHER; note = 2-Prime-O-Methoxyethyl modified nucleoside
  modified_base 2: mod_base = OTHER; note = 2-Prime-O-Methoxyethyl modified 5-methyl Cytidine
  modified_base 16: mod_base = OTHER; note = 2-Prime-O-Methoxyethyl modified 5-methyl Uridine
  modified_base 17: mod_base = OTHER; note = DNA nucleotide carrying a 6-amino-5-nitro-3-yl-2(1H)-pyridone nucleobase
  modified_base 18: mod_base = OTHER; note = DNA nucleotide carrying a hypoxanthine nucleobase
  modified_base order(11,13,15,20,22,24,26): mod_base = OTHER; note = 2-Prime-Fluoro modified nucleoside
  modified_base order(6..10,12,14,19,23,25,27..30): mod_base = OTHER; note = 2-Prime-O-Methyl modified nucleoside
  modified_base order(1^2,29^30): mod_base = OTHER; note = (1,3-dimethylimidazolidin-2-ylidene) Phosphoramidate linkage
  modified_base order(6..16,17^18,20..29): mod_base = OTHER; note = Phosphorothioate linkage
  modified_base 18^19: mod_base = OTHER; note = Methylphosphonate linkage
  misc_feature 1..30: note = T2-06

SEQ ID NO: 41 - DNA, 30 bp, synthetic construct; identical to SEQ ID NO: 39
  source 1..30: mol_type = other DNA
  misc_feature 17..18: note = DNA
  misc_feature order(1..16,19..30): note = RNA
  modified_base order(1,3..5,21): mod_base = OTHER; note = 2-Prime-O-Methoxyethyl modified nucleoside
  modified_base 2: mod_base = OTHER; note = 2-Prime-O-Methoxyethyl modified 5-methyl Cytidine
  modified_base 16: mod_base = OTHER; note = 2-Prime-O-Methoxyethyl modified 5-methyl Uridine
  modified_base 17: mod_base = OTHER; note = DNA nucleotide carrying a 6-amino-5-nitro-3-yl-2(1H)-pyridone nucleobase
  modified_base 18: mod_base = OTHER; note = DNA nucleotide carrying a hypoxanthine nucleobase
  modified_base order(10..15,20,22..27): mod_base = OTHER; note = 2-Prime-Fluoro modified nucleoside
  modified_base order(6..9,19,28..30): mod_base = OTHER; note = 2-Prime-O-Methyl modified nucleoside
  modified_base order(1^2,29^30): mod_base = OTHER; note = (1,3-dimethylimidazolidin-2-ylidene) Phosphoramidate linkage
  modified_base order(6..18,19..29): mod_base = OTHER; note = Phosphorothioate linkage
  modified_base 18^19: mod_base = OTHER; note = Methylphosphonate linkage
  misc_feature 1..30: note = T2-07

SEQ ID NO: 42 - DNA, 30 bp, synthetic construct; identical to SEQ ID NO: 39
  source 1..30: mol_type = other DNA
  misc_feature 17..18: note = DNA
  misc_feature order(1..16,19..30): note = RNA
  modified_base order(1,3..5,21): mod_base = OTHER; note = 2-Prime-O-Methoxyethyl modified nucleoside
  modified_base 2: mod_base = OTHER; note = 2-Prime-O-Methoxyethyl modified 5-methyl Cytidine
  modified_base 16: mod_base = OTHER; note = 2-Prime-O-Methoxyethyl modified 5-methyl Uridine
  modified_base 17: mod_base = OTHER; note = DNA nucleotide carrying a 6-amino-5-nitro-3-yl-2(1H)-pyridone nucleobase
  modified_base 18: mod_base = OTHER; note = DNA nucleotide carrying a hypoxanthine nucleobase
  modified_base order(11,13,15,20,22,24,26): mod_base = OTHER; note = 2-Prime-Fluoro modified nucleoside
  modified_base order(6..10,12,14,19,23,25,27..30): mod_base = OTHER; note = 2-Prime-O-Methyl modified nucleoside
  modified_base order(1^2,29^30): mod_base = OTHER; note = (1,3-dimethylimidazolidin-2-ylidene) Phosphoramidate linkage
  modified_base order(6..18,19..29): mod_base = OTHER; note = Phosphorothioate linkage
  modified_base 18^19: mod_base = OTHER; note = Methylphosphonate linkage
  misc_feature 1..30: note = T2-08

SEQ ID NO: 43 - DNA, 28 bp, synthetic construct
  source 1..28: mol_type = other DNA
  misc_feature 15..16: note = DNA
  misc_feature order(1..14,17..28): note = RNA
  modified_base order(1..4,19): mod_base = OTHER; note = 2-Prime-O-Methoxyethyl modified nucleoside
  modified_base order(5,14): mod_base = OTHER; note = 2-Prime-O-Methoxyethyl modified 5-methyl Uridine
  modified_base 15: mod_base = OTHER; note = DNA nucleotide carrying a 6-amino-5-nitro-3-yl-2(1H)-pyridone nucleobase
  modified_base 16: mod_base = OTHER; note = DNA nucleotide carrying a hypoxanthine nucleobase
  modified_base order(8..13,18,20..25): mod_base = OTHER; note = 2-Prime-Fluoro modified nucleoside
  modified_base order(6..7,17,26..28): mod_base = OTHER; note = 2-Prime-O-Methyl modified nucleoside
  modified_base order(1^2,27^28): mod_base = OTHER; note = (1,3-dimethylimidazolidin-2-ylidene) Phosphoramidate linkage
  modified_base order(6..14,15^16,18..27): mod_base = OTHER; note = Phosphorothioate linkage
  modified_base 16^17: mod_base = OTHER; note = Methylphosphonate linkage
  misc_feature 1..28: note = T2-09
agagttggacatttnngcatccagtctc

SEQ ID NO: 44 - DNA, 28 bp, synthetic construct
  source 1..28: mol_type = other DNA
  misc_feature 15..16: note = DNA
  misc_feature order(1..14,17..28): note = RNA
  modified_base order(1..4,19): mod_base = OTHER; note = 2-Prime-O-Methoxyethyl modified nucleoside
  modified_base order(5,14): mod_base = OTHER; note = 2-Prime-O-Methoxyethyl modified 5-methyl Uridine
  modified_base 15: mod_base = OTHER; note = DNA nucleotide carrying a 6-amino-5-nitro-3-yl-2(1H)-pyridone nucleobase
  modified_base 16: mod_base = OTHER; note = DNA nucleotide carrying a hypoxanthine nucleobase
  modified_base order(9,11,13,18,20,22,24): mod_base = OTHER; note = 2-Prime-Fluoro modified nucleoside
  modified_base order(6..8,10,12,17,21,23,25..28): mod_base = OTHER; note = 2-Prime-O-Methyl modified nucleoside
  modified_base order(1^2,27^28): mod_base = OTHER; note = (1,3-dimethylimidazolidin-2-ylidene) Phosphoramidate linkage
  modified_base order(6..14,15^16,18..27): mod_base = OTHER; note = Phosphorothioate linkage
  modified_base 16^17: mod_base = OTHER; note = Methylphosphonate linkage
  misc_feature 1..28: note = T2-10
agagttggacatttnngcatccagtctc

SEQ ID NO: 45 - DNA, 28 bp, synthetic construct
  source 1..28: mol_type = other DNA
  misc_feature 15..16: note = DNA
  misc_feature order(1..14,17..28): note = RNA
  modified_base order(1..4,19): mod_base = OTHER; note = 2-Prime-O-Methoxyethyl modified nucleoside
  modified_base order(5,14): mod_base = OTHER; note = 2-Prime-O-Methoxyethyl modified 5-methyl Uridine
  modified_base 15: mod_base = OTHER; note = DNA nucleotide carrying a 6-amino-5-nitro-3-yl-2(1H)-pyridone nucleobase
  modified_base 16: mod_base = OTHER; note = DNA nucleotide carrying a hypoxanthine nucleobase
  modified_base order(8..13,18,20..25): mod_base = OTHER; note = 2-Prime-Fluoro modified nucleoside
  modified_base order(6..7,17,26..28): mod_base = OTHER; note = 2-Prime-O-Methyl modified nucleoside
  modified_base order(1^2,27^28): mod_base = OTHER; note = (1,3-dimethylimidazolidin-2-ylidene) Phosphoramidate linkage
  modified_base order(6..16,17..27): mod_base = OTHER; note = Phosphorothioate linkage
  modified_base 16^17: mod_base = OTHER; note = Methylphosphonate linkage
  misc_feature 1..28: note = T2-11
agagttggacatttnngcatccagtctc

SEQ ID NO: 46 - DNA, 28 bp, synthetic construct
  source 1..28: mol_type = other DNA
  misc_feature 15..16: note = DNA
  misc_feature order(1..14,17..28): note = RNA
  modified_base order(1..4,19): mod_base = OTHER; note = 2-Prime-O-Methoxyethyl modified nucleoside
  modified_base order(5,14): mod_base = OTHER; note = 2-Prime-O-Methoxyethyl modified 5-methyl Uridine
  modified_base 15: mod_base = OTHER; note = DNA nucleotide carrying a 6-amino-5-nitro-3-yl-2(1H)-pyridone nucleobase
  modified_base 16: mod_base = OTHER; note = DNA nucleotide carrying a hypoxanthine nucleobase
  modified_base order(9,11,13,18,20,22,24): mod_base = OTHER; note = 2-Prime-Fluoro modified nucleoside
  modified_base order(6..8,10,12,17,21,23,25..28): mod_base = OTHER; note = 2-Prime-O-Methyl modified nucleoside
  modified_base order(1^2,27^28): mod_base = OTHER; note = (1,3-dimethylimidazolidin-2-ylidene) Phosphoramidate linkage
  modified_base order(6..16,17..27): mod_base = OTHER; note = Phosphorothioate linkage
  modified_base 16^17: mod_base = OTHER; note = Methylphosphonate linkage
  misc_feature 1..28: note = T2-12
agagttggacatttnngcatccagtctc

SEQ ID NO: 47 - DNA, 26 bp, synthetic construct
  source 1..26: mol_type = other DNA
  misc_feature 13..14: note = DNA
  misc_feature order(1..12,15..26): note = RNA
  modified_base order(1..2,17): mod_base = OTHER; note = 2-Prime-O-Methoxyethyl modified nucleoside
  modified_base order(3,12): mod_base = OTHER; note = 2-Prime-O-Methoxyethyl modified 5-methyl Uridine
  modified_base 13: mod_base = OTHER; note = DNA nucleotide carrying a 6-amino-5-nitro-3-yl-2(1H)-pyridone nucleobase
  modified_base 14: mod_base = OTHER; note = DNA nucleotide carrying a hypoxanthine nucleobase
  modified_base order(6..11,16,18..23): mod_base = OTHER; note = 2-Prime-Fluoro modified nucleoside
  modified_base order(4..5,15,24..26): mod_base = OTHER; note = 2-Prime-O-Methyl modified nucleoside
  modified_base order(1^2,25^26): mod_base = OTHER; note = (1,3-dimethylimidazolidin-2-ylidene) Phosphoramidate linkage
  modified_base order(4..12,13^14,16..25): mod_base = OTHER; note = Phosphorothioate linkage
  modified_base 14^15: mod_base = OTHER; note = Methylphosphonate linkage
  misc_feature 1..26: note = T2-13
agttggacatttnngcatccagtctc

SEQ ID NO: 48 - DNA, 26 bp, synthetic construct
  source 1..26: mol_type = other DNA
  misc_feature 13..14: note = DNA
  misc_feature order(1..12,15..26): note = RNA
  modified_base order(1..2,17): mod_base = OTHER; note = 2-Prime-O-Methoxyethyl modified nucleoside
  modified_base order(3,12): mod_base = OTHER; note = 2-Prime-O-Methoxyethyl modified 5-methyl Uridine
  modified_base 13: mod_base = OTHER; note = DNA nucleotide carrying a 6-amino-5-nitro-3-yl-2(1H)-pyridone nucleobase
  modified_base 14: mod_base = OTHER; note = DNA nucleotide carrying a hypoxanthine nucleobase
  modified_base order(7,9,11,16,18,20,22): mod_base = OTHER; note = 2-Prime-Fluoro modified nucleoside
  modified_base order(4..6,8,10,15,19,21,23..26): mod_base = OTHER; note = 2-Prime-O-Methyl modified nucleoside
  modified_base order(1^2,25^26): mod_base = OTHER; note = (1,3-dimethylimidazolidin-2-ylidene) Phosphoramidate linkage
  modified_base order(4..12,13^14,16..25): mod_base = OTHER; note = Phosphorothioate linkage
  modified_base 14^15: mod_base = OTHER; note = Methylphosphonate linkage
  misc_feature 1..26: note = T2-14
agttggacatttnngcatccagtctc

SEQ ID NO: 49 - DNA, 26 bp, synthetic construct
  source 1..26: mol_type = other DNA
  misc_feature 13..14: note = DNA
  misc_feature order(1..12,15..26): note = RNA
  modified_base order(1..2,17): mod_base = OTHER; note = 2-Prime-O-Methoxyethyl modified nucleoside
  modified_base order(3,12): mod_base = OTHER; note = 2-Prime-O-Methoxyethyl modified 5-methyl Uridine
  modified_base 13: mod_base = OTHER; note = DNA nucleotide carrying a 6-amino-5-nitro-3-yl-2(1H)-pyridone nucleobase
  modified_base 14: mod_base = OTHER; note = DNA nucleotide carrying a hypoxanthine nucleobase
  modified_base order(6..11,16,18..23): mod_base = OTHER; note = 2-Prime-Fluoro modified nucleoside
  modified_base order(4..5,15,24..26): mod_base = OTHER; note = 2-Prime-O-Methyl modified nucleoside
  modified_base order(1^2,25^26): mod_base = OTHER; note = (1,3-dimethylimidazolidin-2-ylidene) Phosphoramidate linkage
  modified_base order(4..14,15..25): mod_base = OTHER; note = Phosphorothioate linkage
  modified_base 14^15: mod_base = OTHER; note = Methylphosphonate linkage
  misc_feature 1..26: note = T2-15
agttggacatttnngcatccagtctc

SEQ ID NO: 50 - DNA, 26 bp, synthetic construct
  source 1..26: mol_type = other DNA
  misc_feature 13..14: note = DNA
  misc_feature order(1..12,15..26): note = RNA
  modified_base order(1..2,17): mod_base = OTHER; note = 2-Prime-O-Methoxyethyl modified nucleoside
  modified_base order(3,12): mod_base = OTHER; note = 2-Prime-O-Methoxyethyl modified 5-methyl Uridine
  modified_base 13: mod_base = OTHER; note = DNA nucleotide carrying a 6-amino-5-nitro-3-yl-2(1H)-pyridone nucleobase
  modified_base 14: mod_base = OTHER; note = DNA nucleotide carrying a hypoxanthine nucleobase
  modified_base order(7,9,11,16,18,20,22): mod_base = OTHER; note = 2-Prime-Fluoro modified nucleoside
  modified_base order(4..6,8,10,15,19,21,23..26): mod_base = OTHER; note = 2-Prime-O-Methyl modified nucleoside
  modified_base order(1^2,25^26): mod_base = OTHER; note = (1,3-dimethylimidazolidin-2-ylidene) Phosphoramidate linkage
  modified_base order(4..14,15..25): mod_base = OTHER; note = Phosphorothioate linkage
  modified_base 14^15: mod_base = OTHER; note = Methylphosphonate linkage
  misc_feature 1..26: note = T2-16
agttggacatttnngcatccagtctc

SEQ ID NO: 51 - DNA, 30 bp, synthetic construct
  source 1..30: mol_type = other DNA
  misc_feature 19..20: note = DNA
  misc_feature order(1..18,21..30): note = RNA
  modified_base order(1..3,5,23): mod_base = OTHER; note = 2-Prime-O-Methoxyethyl modified nucleoside
  modified_base 4: mod_base = OTHER; note = 2-Prime-O-Methoxyethyl modified 5-methyl Cytidine
  modified_base 18: mod_base = OTHER; note = 2-Prime-O-Methoxyethyl modified 5-methyl Uridine
  modified_base 19: mod_base = OTHER; note = DNA nucleotide carrying a 6-amino-5-nitro-3-yl-2(1H)-pyridone nucleobase
  modified_base 20: mod_base = OTHER; note = DNA nucleotide carrying a hypoxanthine nucleobase
  modified_base order(12..17,22,24..29): mod_base = OTHER; note = 2-Prime-Fluoro modified nucleoside
  modified_base order(6..11,21,30): mod_base = OTHER; note = 2-Prime-O-Methyl modified nucleoside
  modified_base order(1^2,29^30): mod_base = OTHER; note = (1,3-dimethylimidazolidin-2-ylidene) Phosphoramidate linkage
  modified_base order(6..18,19^20,22..29): mod_base = OTHER; note = Phosphorothioate linkage
  modified_base 20^21: mod_base = OTHER; note = Methylphosphonate linkage
  misc_feature 1..30: note = T2-17
gaacagagttggacatttnngcatccagtc

SEQ ID NO: 52 - DNA, 30 bp, synthetic construct; identical to SEQ ID NO: 51
  source 1..30: mol_type = other DNA
  misc_feature 19..20: note = DNA
  misc_feature order(1..18,21..30): note = RNA
  modified_base order(1..3,5,23): mod_base = OTHER; note = 2-Prime-O-Methoxyethyl modified nucleoside
  modified_base 4: mod_base = OTHER; note = 2-Prime-O-Methoxyethyl modified 5-methyl Cytidine
  modified_base 18: mod_base = OTHER; note = 2-Prime-O-Methoxyethyl modified 5-methyl Uridine
  modified_base 19: mod_base = OTHER; note = DNA nucleotide carrying a 6-amino-5-nitro-3-yl-2(1H)-pyridone nucleobase
  modified_base 20: mod_base = OTHER; note = DNA nucleotide carrying a hypoxanthine nucleobase
  modified_base order(13,15,17,22,24,26,28): mod_base = OTHER; note = 2-Prime-Fluoro modified nucleoside
  modified_base order(6..12,14,16,21,25,27,29..30): mod_base = OTHER; note = 2-Prime-O-Methyl modified nucleoside
  modified_base order(1^2,29^30): mod_base = OTHER; note = (1,3-dimethylimidazolidin-2-ylidene) Phosphoramidate linkage
  modified_base order(6..18,19^20,22..29): mod_base = OTHER; note = Phosphorothioate linkage
  modified_base 20^21: mod_base = OTHER; note = Methylphosphonate linkage
  misc_feature 1..30: note = T2-18

SEQ ID NO: 53 - DNA, 30 bp, synthetic construct; identical to SEQ ID NO: 51
  source 1..30: mol_type = other DNA
  misc_feature 19..20: note = DNA
  misc_feature order(1..18,21..30): note = RNA
  modified_base order(1..3,5,23): mod_base = OTHER; note = 2-Prime-O-Methoxyethyl modified nucleoside
  modified_base 4: mod_base = OTHER; note = 2-Prime-O-Methoxyethyl modified 5-methyl Cytidine
  modified_base 18: mod_base = OTHER; note = 2-Prime-O-Methoxyethyl modified 5-methyl Uridine
  modified_base 19: mod_base = OTHER; note = DNA nucleotide carrying a 6-amino-5-nitro-3-yl-2(1H)-pyridone nucleobase
  modified_base 20: mod_base = OTHER; note = DNA nucleotide carrying a hypoxanthine nucleobase
  modified_base order(12..17,22,24..29): mod_base = OTHER; note = 2-Prime-Fluoro modified nucleoside
  modified_base order(6..11,21,30): mod_base = OTHER; note = 2-Prime-O-Methyl modified nucleoside
  modified_base order(1^2,29^30): mod_base = OTHER; note = (1,3-dimethylimidazolidin-2-ylidene) Phosphoramidate linkage
  modified_base order(6..20,21..29): mod_base = OTHER; note = Phosphorothioate linkage
  modified_base 20^21: mod_base = OTHER; note = Methylphosphonate linkage
  misc_feature 1..30: note = T2-19

SEQ ID NO: 54 - DNA, 30 bp, synthetic construct; identical to SEQ ID NO: 51
  source 1..30: mol_type = other DNA
  misc_feature 19..20: note = DNA
  misc_feature order(1..18,21..30): note = RNA
  modified_base order(1..3,5,23): mod_base = OTHER; note = 2-Prime-O-Methoxyethyl modified nucleoside
  modified_base 4: mod_base = OTHER; note = 2-Prime-O-Methoxyethyl modified 5-methyl Cytidine
  modified_base 18: mod_base = OTHER; note = 2-Prime-O-Methoxyethyl modified 5-methyl Uridine
  modified_base 19: mod_base = OTHER; note = DNA nucleotide carrying a 6-amino-5-nitro-3-yl-2(1H)-pyridone nucleobase
  modified_base 20: mod_base = OTHER; note = DNA nucleotide carrying a hypoxanthine nucleobase
  modified_base order(13,15,17,22,24,26,28): mod_base = OTHER; note = 2-Prime-Fluoro modified nucleoside
  modified_base order(6..12,14,16,21,25,27,29..30): mod_base = OTHER; note = 2-Prime-O-Methyl modified nucleoside
  modified_base order(1^2,29^30): mod_base = OTHER; note = (1,3-dimethylimidazolidin-2-ylidene) Phosphoramidate linkage
  modified_base order(6..20,21..29): mod_base = OTHER; note = Phosphorothioate linkage
  modified_base 20^21: mod_base = OTHER; note = Methylphosphonate linkage
  misc_feature 1..30: note = T2-20

SEQ ID NO: 55 - DNA, 28 bp, synthetic construct
  source 1..28: mol_type = other DNA
  misc_feature 19..20: note = DNA
  misc_feature order(1..18,21..28): note = RNA
  modified_base order(1..3,5,23): mod_base = OTHER; note = 2-Prime-O-Methoxyethyl modified nucleoside
  modified_base 4: mod_base = OTHER; note = 2-Prime-O-Methoxyethyl modified 5-methyl Cytidine
  modified_base 18: mod_base = OTHER; note = 2-Prime-O-Methoxyethyl modified 5-methyl Uridine
  modified_base 19: mod_base = OTHER; note = DNA nucleotide carrying a 6-amino-5-nitro-3-yl-2(1H)-pyridone nucleobase
  modified_base 20: mod_base = OTHER; note = DNA nucleotide carrying a hypoxanthine nucleobase
  modified_base order(12..17,22,24..28): mod_base = OTHER; note = 2-Prime-Fluoro modified nucleoside
  modified_base order(6..11,21): mod_base = OTHER; note = 2-Prime-O-Methyl modified nucleoside
  modified_base order(1^2,27^28): mod_base = OTHER; note = (1,3-dimethylimidazolidin-2-ylidene) Phosphoramidate linkage
  modified_base order(6..18,19^20,22..27): mod_base = OTHER; note = Phosphorothioate linkage
  modified_base 20^21: mod_base = OTHER; note = Methylphosphonate linkage
  misc_feature 1..28: note = T2-21
gaacagagttggacatttnngcatccag

SEQ ID NO: 56 - DNA, 28 bp, synthetic construct
  source 1..28: mol_type = other DNA
  misc_feature 19..20: note = DNA
  misc_feature order(1..18,21..28): note = RNA
  modified_base order(1..3,5,23): mod_base = OTHER; note = 2-Prime-O-Methoxyethyl modified nucleoside
  modified_base 4: mod_base = OTHER; note = 2-Prime-O-Methoxyethyl modified 5-methyl Cytidine
  modified_base 18: mod_base = OTHER; note = 2-Prime-O-Methoxyethyl modified 5-methyl Uridine
  modified_base 19: mod_base = OTHER; note = DNA nucleotide carrying a 6-amino-5-nitro-3-yl-2(1H)-pyridone nucleobase
  modified_base 20: mod_base = OTHER; note = DNA nucleotide carrying a hypoxanthine nucleobase
  modified_base order(13,15,17,22,24,26,28): mod_base = OTHER; note = 2-Prime-Fluoro modified nucleoside
  modified_base order(6..12,14,16,21,25,27): mod_base = OTHER; note = 2-Prime-O-Methyl modified nucleoside
  modified_base order(1^2,27^28): mod_base = OTHER; note = (1,3-dimethylimidazolidin-2-ylidene) Phosphoramidate linkage
  modified_base order(6..18,19^20,22..27): mod_base = OTHER; note = Phosphorothioate linkage
  modified_base 20^21: mod_base = OTHER; note = Methylphosphonate linkage
  misc_feature 1..28: note = T2-22
gaacagagttggacatttnngcatccag

SEQ ID NO: 57 - DNA, 28 bp, synthetic construct
  source 1..28: mol_type = other DNA
  misc_feature 19..20: note = DNA
  misc_feature order(1..18,21..28): note = RNA
  modified_base order(1..3,5,23): mod_base = OTHER; note = 2-Prime-O-Methoxyethyl modified nucleoside
  modified_base 4: mod_base = OTHER; note = 2-Prime-O-Methoxyethyl modified 5-methyl Cytidine
  modified_base 18: mod_base = OTHER; note = 2-Prime-O-Methoxyethyl modified 5-methyl Uridine
  modified_base 19: mod_base = OTHER; note = DNA nucleotide carrying a 6-amino-5-nitro-3-yl-2(1H)-pyridone nucleobase
  modified_base 20: mod_base = OTHER; note = DNA nucleotide carrying a hypoxanthine nucleobase
  modified_base order(12..17,22,24..28): mod_base = OTHER; note = 2-Prime-Fluoro modified nucleoside
  modified_base order(6..11,21): mod_base = OTHER; note = 2-Prime-O-Methyl modified nucleoside
  modified_base order(1^2,27^28): mod_base = OTHER; note = (1,3-dimethylimidazolidin-2-ylidene) Phosphoramidate linkage
  modified_base order(6..20,21..27): mod_base = OTHER; note = Phosphorothioate linkage
  modified_base 20^21: mod_base = OTHER; note = Methylphosphonate linkage
  misc_feature 1..28: note = T2-23
gaacagagttggacatttnngcatccag

SEQ ID NO: 58 - DNA, 28 bp, synthetic construct
  source 1..28: mol_type = other DNA
  misc_feature 19..20: note = DNA
  misc_feature order(1..18,21..28): note = RNA
  modified_base order(1..3,5,23): mod_base = OTHER; note = 2-Prime-O-Methoxyethyl modified nucleoside
  modified_base 4: mod_base = OTHER; note = 2-Prime-O-Methoxyethyl modified 5-methyl Cytidine
  modified_base 18: mod_base = OTHER; note = 2-Prime-O-Methoxyethyl modified 5-methyl Uridine
  modified_base 19: mod_base = OTHER; note = DNA nucleotide carrying a 6-amino-5-nitro-3-yl-2(1H)-pyridone nucleobase
  modified_base 20: mod_base = OTHER; note = DNA nucleotide carrying a hypoxanthine nucleobase
  modified_base order(13,15,17,22,24,26,28): mod_base = OTHER; note = 2-Prime-Fluoro modified nucleoside
  modified_base order(6..12,14,16,21,25,27): mod_base = OTHER; note = 2-Prime-O-Methyl modified nucleoside
  modified_base order(1^2,27^28): mod_base = OTHER; note = (1,3-dimethylimidazolidin-2-ylidene) Phosphoramidate linkage
  modified_base order(6..20,21..27): mod_base = OTHER; note = Phosphorothioate linkage
  modified_base 20^21: mod_base = OTHER; note = Methylphosphonate linkage
  misc_feature 1..28: note = T2-24
gaacagagttggacatttnngcatccag

SEQ ID NO: 59 - DNA, 30 bp, synthetic construct
  source 1..30: mol_type = other DNA
  misc_feature 24..25: note = DNA
  misc_feature order(1..23,26..30): note = RNA
  modified_base 28: mod_base = OTHER; note = 2-Prime-O-Methoxyethyl modified nucleoside
  modified_base 23: mod_base = OTHER; note = 2-Prime-O-Methoxyethyl modified 5-methyl Uridine
  modified_base 24: mod_base = OTHER; note = DNA nucleotide carrying a 6-amino-5-nitro-3-yl-2(1H)-pyridone nucleobase
  modified_base 25: mod_base = OTHER; note = DNA nucleotide carrying a hypoxanthine nucleobase
  modified_base order(5..6,9..10,13..14,17..22,27): mod_base = OTHER; note = 2-Prime-Fluoro modified nucleoside
  modified_base order(1..4,7..8,11..12,15..16,26,29..30): mod_base = OTHER; note = 2-Prime-O-Methyl modified nucleoside
  modified_base order(1^2,29^30): mod_base = OTHER; note = (1,3-dimethylimidazolidin-2-ylidene) Phosphoramidate linkage
  modified_base order(2..23,24^25,27..29): mod_base = OTHER; note = Phosphorothioate linkage
  modified_base 25^26: mod_base = OTHER; note = Methylphosphonate linkage
  misc_feature 1..30: note = T2-25
tggtggaacagagttggacatttnngcatc

SEQ ID NO: 60 - DNA, 30 bp, synthetic construct; identical to SEQ ID NO: 59
  source 1..30: mol_type = other DNA
  misc_feature 24..25: note = DNA
  misc_feature order(1..23,26..30): note = RNA
  modified_base 28: mod_base = OTHER; note = 2-Prime-O-Methoxyethyl modified nucleoside
  modified_base 23: mod_base = OTHER; note = 2-Prime-O-Methoxyethyl modified 5-methyl Uridine
  modified_base 24: mod_base = OTHER; note = DNA nucleotide carrying a 6-amino-5-nitro-3-yl-2(1H)-pyridone nucleobase
  modified_base 25: mod_base = OTHER; note = DNA nucleotide carrying a hypoxanthine nucleobase
  modified_base order(4..5,8..9,11..15,18..19,22,27): mod_base = OTHER; note = 2-Prime-Fluoro modified nucleoside
  modified_base order(1..3,6..7,10,16..17,20..21,26,29..30): mod_base = OTHER; note = 2-Prime-O-Methyl modified nucleoside
  modified_base order(1^2,11^12,14^15,29^30): mod_base = OTHER; note = (1,3-dimethylimidazolidin-2-ylidene) Phosphoramidate linkage
  modified_base order(2..6,8..11,12^13,18..20,21..23,24^25,27..29): mod_base = OTHER; note = Phosphorothioate linkage
  modified_base 25^26: mod_base = OTHER; note = Methylphosphonate linkage
  misc_feature 1..30: note = T2-26

SEQ ID NO: 61 - DNA, 30 bp, synthetic construct; identical to SEQ ID NO: 59
  source 1..30: mol_type = other DNA
  misc_feature 24..25: note = DNA
  misc_feature order(1..23,26..30): note = RNA
  modified_base 28: mod_base = OTHER; note = 2-Prime-O-Methoxyethyl modified nucleoside
  modified_base 23: mod_base = OTHER; note = 2-Prime-O-Methoxyethyl modified 5-methyl Uridine
  modified_base 24: mod_base = OTHER; note = DNA nucleotide carrying a 6-amino-5-nitro-3-yl-2(1H)-pyridone nucleobase
  modified_base 25: mod_base = OTHER; note = DNA nucleotide carrying a hypoxanthine nucleobase
  modified_base order(4..6,8..9,11,13..15,18..20,22,27): mod_base = OTHER; note = 2-Prime-Fluoro modified nucleoside
  modified_base order(1..3,7,10,12,16..17,21,26,29..30): mod_base = OTHER; note = 2-Prime-O-Methyl modified nucleoside
  modified_base order(1^2,11^12,14^15,29^30): mod_base = OTHER; note = (1,3-dimethylimidazolidin-2-ylidene) Phosphoramidate linkage
  modified_base order(2..6,7..9,10^11,13^14,16..21,22^23,24^25,27..29): mod_base = OTHER; note = Phosphorothioate linkage
  modified_base 25^26: mod_base = OTHER; note = Methylphosphonate linkage
  misc_feature 1..30: note = T2-27

SEQ ID NO: 62 - DNA, 30 bp, synthetic construct
  source 1..30: mol_type = other DNA
  misc_feature 24..25: note = DNA
  misc_feature order(1..23,26..30): note = RNA
  modified_base order(6..7,16,28): mod_base = OTHER; note = 2-Prime-O-Methoxyethyl modified nucleoside
  modified_base order(21,23): mod_base = OTHER; note = 2-Prime-O-Methoxyethyl modified 5-methyl Uridine
  modified_base 24: mod_base = OTHER; note = DNA nucleotide carrying a 6-amino-5-nitro-3-yl-2(1H)-pyridone nucleobase
  modified_base 25: mod_base = OTHER; note = DNA nucleotide carrying a hypoxanthine nucleobase
  modified_base order(4..5,8..9,13..15,17,19,22,27): mod_base = OTHER; note = 2-Prime-Fluoro modified nucleoside
  modified_base order(1..3,10..12,18,20,26,29..30): mod_base = OTHER; note = 2-Prime-O-Methyl modified nucleoside
  modified_base order(1^2,11^12,14^15,19^20,29^30): mod_base = OTHER; note = (1,3-dimethylimidazolidin-2-ylidene) Phosphoramidate linkage
  modified_base order(2..6,8..10,13^14,16..18,22^23,24^25,27..29): mod_base = OTHER; note = Phosphorothioate linkage
  modified_base 25^26: mod_base = OTHER; note = Methylphosphonate linkage
  misc_feature 1..30: note = T2-28
tggtggaacagagttggacatttnnggatc

SEQ ID NO: 63 - DNA, 30 bp, synthetic construct; identical to SEQ ID NO: 62
  source 1..30: mol_type = other DNA
  misc_feature 24..25: note = DNA
  misc_feature order(1..23,26..30): note = RNA
  modified_base order(6..7,10,16,20,28): mod_base = OTHER; note = 2-Prime-O-Methoxyethyl modified nucleoside
  modified_base order(21,23): mod_base = OTHER; note = 2-Prime-O-Methoxyethyl modified 5-methyl Uridine
  modified_base 24: mod_base = OTHER; note = DNA nucleotide carrying a 6-amino-5-nitro-3-yl-2(1H)-pyridone nucleobase
  modified_base 25: mod_base = OTHER; note = DNA nucleotide carrying a hypoxanthine nucleobase
  modified_base order(4..5,8..9,11,13..15,17..19,22,27): mod_base = OTHER; note = 2-Prime-Fluoro modified nucleoside
  modified_base order(1..3,12,26,29..30): mod_base = OTHER; note = 2-Prime-O-Methyl modified nucleoside
  modified_base order(1^2,11^12,14^15,19^20,29^30): mod_base = OTHER; note = (1,3-dimethylimidazolidin-2-ylidene) Phosphoramidate linkage
  modified_base order(2..6,8..10,13^14,16..19,22^23,24^25,27..29): mod_base = OTHER; note = Phosphorothioate linkage
  modified_base 25^26: mod_base = OTHER; note = Methylphosphonate linkage
  misc_feature 1..30: note = T2-29

SEQ ID NO: 64 - DNA, 27 bp, synthetic construct
  source 1..27: mol_type = other DNA
  misc_feature 16..17: note = DNA
  misc_feature order(1..15,18..27): note = RNA
  modified_base order(2,4,8..9,12,20): mod_base = OTHER; note = 2-Prime-O-Methoxyethyl modified nucleoside
  modified_base 1: mod_base = OTHER; note = 2-Prime-O-Methoxyethyl modified 5-methyl Cytidine
  modified_base order(13,15): mod_base = OTHER; note = 2-Prime-O-Methoxyethyl modified 5-methyl Uridine
  modified_base 16: mod_base = OTHER; note = DNA nucleotide carrying a 6-amino-5-nitro-3-yl-2(1H)-pyridone nucleobase
  modified_base 17: mod_base = OTHER; note = DNA nucleotide carrying a hypoxanthine nucleobase
  modified_base order(5..6,14,19,21,23,25): mod_base = OTHER; note = 2-Prime-Fluoro modified nucleoside
  modified_base order(3,7,10..11,18,22,24,26..27): mod_base = OTHER; note = 2-Prime-O-Methyl modified nucleoside
  modified_base order(2^3,5^6,9..12,14..17,18..26): mod_base = OTHER; note = Phosphorothioate linkage
  modified_base order(3^4,6^7,26^27): mod_base = OTHER; note = (1,3-dimethylimidazolidin-2-ylidene) Phosphoramidate linkage
  modified_base 17^18: mod_base = OTHER; note = Methylphosphonate linkage
  misc_feature 1..27: note = T2-30
cagagttggacatttnnggatccagtc

SEQ ID NO: 65 - DNA, 32 bp, synthetic construct
  source 1..32: mol_type = other DNA
  misc_feature 19..20: note = DNA
  misc_feature order(1..18,21..32): note = RNA
  modified_base order(1,3): mod_base = OTHER; note = 2-Prime-O-Methoxyethyl modified nucleoside
  modified_base order(2,18): mod_base = OTHER; note = 2-Prime-O-Methoxyethyl modified 5-methyl Cytidine
  modified_base order(4..5,23): mod_base = OTHER; note = 2-Prime-O-Methoxyethyl modified 5-methyl Uridine
  modified_base 19: mod_base = OTHER; note = DNA nucleotide carrying a 6-amino-5-nitro-3-yl-2(1H)-pyridone nucleobase
  modified_base order(12..17,22,24..29): mod_base = OTHER; note = 2-Prime-Fluoro modified nucleoside
  modified_base order(6..11,21,30..32): mod_base = OTHER; note = 2-Prime-O-Methyl modified nucleoside
  modified_base order(1^2,31^32): mod_base = OTHER; note = (1,3-dimethylimidazolidin-2-ylidene) Phosphoramidate linkage
  modified_base order(6..18,19^20,22..31): mod_base = OTHER; note = Phosphorothioate linkage
  modified_base 20^21: mod_base = OTHER; note = Methylphosphonate linkage
  misc_feature 1..32: note = T3-01
acattttggcatccagtcnccatgctgacagt

SEQ ID NO: 66 - DNA, 32 bp, synthetic construct; identical to SEQ ID NO: 65
  source 1..32: mol_type = other DNA
  misc_feature 19..20: note = DNA
  misc_feature order(1..18,21..32): note = RNA
  modified_base order(1,3): mod_base = OTHER; note = 2-Prime-O-Methoxyethyl modified nucleoside
  modified_base order(2,18): mod_base = OTHER; note = 2-Prime-O-Methoxyethyl modified 5-methyl Cytidine
  modified_base order(4..5,23): mod_base = OTHER; note = 2-Prime-O-Methoxyethyl modified 5-methyl Uridine
  modified_base 19: mod_base = OTHER; note = DNA nucleotide carrying a 6-amino-5-nitro-3-yl-2(1H)-pyridone nucleobase
  modified_base order(13,15,17,22,24,26,28): mod_base = OTHER; note = 2-Prime-Fluoro modified nucleoside
  modified_base order(6..12,14,16,21,25,27,29..32): mod_base = OTHER; note = 2-Prime-O-Methyl modified nucleoside
  modified_base order(1^2,31^32): mod_base = OTHER; note = (1,3-dimethylimidazolidin-2-ylidene) Phosphoramidate linkage
  modified_base order(6..18,19^20,22..31): mod_base = OTHER; note = Phosphorothioate linkage
  modified_base 20^21: mod_base = OTHER; note = Methylphosphonate linkage
  misc_feature 1..32: note = T3-02

SEQ ID NO: 67 - DNA, 32 bp, synthetic construct; identical to SEQ ID NO: 65
  source 1..32: mol_type = other DNA
  misc_feature 19..20: note = DNA
  misc_feature order(1..18,21..32): note = RNA
  modified_base order(1,3): mod_base = OTHER; note = 2-Prime-O-Methoxyethyl modified nucleoside
  modified_base order(2,18): mod_base = OTHER; note = 2-Prime-O-Methoxyethyl modified 5-methyl Cytidine
  modified_base order(4..5,23): mod_base = OTHER; note = 2-Prime-O-Methoxyethyl modified 5-methyl Uridine
  modified_base 19: mod_base = OTHER; note = DNA nucleotide carrying a 6-amino-5-nitro-3-yl-2(1H)-pyridone nucleobase
  modified_base order(12..17,22,24..29): mod_base = OTHER; note = 2-Prime-Fluoro modified nucleoside
  modified_base order(6..11,21,30..32): mod_base = OTHER; note = 2-Prime-O-Methyl modified nucleoside
  modified_base order(1^2,31^32): mod_base = OTHER; note = (1,3-dimethylimidazolidin-2-ylidene) Phosphoramidate linkage
  modified_base order(6..20,21..31): mod_base = OTHER; note = Phosphorothioate linkage
  modified_base 20^21: mod_base = OTHER; note = Methylphosphonate linkage
  misc_feature 1..32: note = T3-03

SEQ ID NO: 68 - DNA, 32 bp, synthetic construct; identical to SEQ ID NO: 65
  source 1..32: mol_type = other DNA
  misc_feature 19..20: note = DNA
  misc_feature order(1..18,21..32): note = RNA
  modified_base order(1,3): mod_base = OTHER; note = 2-Prime-O-Methoxyethyl modified nucleoside
  modified_base order(2,18): mod_base = OTHER; note = 2-Prime-O-Methoxyethyl modified 5-methyl Cytidine
  modified_base order(4..5,23): mod_base = OTHER; note = 2-Prime-O-Methoxyethyl modified 5-methyl Uridine
  modified_base 19: mod_base = OTHER; note = DNA nucleotide carrying a 6-amino-5-nitro-3-yl-2(1H)-pyridone nucleobase
  modified_base order(13,15,17,22,24,26,28): mod_base = OTHER; note = 2-Prime-Fluoro modified nucleoside
  modified_base order(6..12,14,16,21,25,27,29..32): mod_base = OTHER; note = 2-Prime-O-Methyl modified nucleoside
  modified_base order(1^2,31^32): mod_base = OTHER; note = (1,3-dimethylimidazolidin-2-ylidene) Phosphoramidate linkage
  modified_base order(6..20,21..31): mod_base = OTHER; note = Phosphorothioate linkage
  modified_base 20^21: mod_base = OTHER; note = Methylphosphonate linkage
  misc_feature 1..32: note = T3-04

SEQ ID NO: 69 - DNA, 30 bp, synthetic construct
  source 1..30: mol_type = other DNA
  misc_feature 17..18: note = DNA
  misc_feature order(1..16,19..30): note = RNA
  modified_base 1: mod_base = OTHER; note = 2-Prime-O-Methoxyethyl modified nucleoside
  modified_base 16: mod_base = OTHER; note = 2-Prime-O-Methoxyethyl modified 5-methyl Cytidine
  modified_base order(2..5,21): mod_base = OTHER; note = 2-Prime-O-Methoxyethyl modified 5-methyl Uridine
  modified_base 17: mod_base = OTHER; note = DNA nucleotide carrying a 6-amino-5-nitro-3-yl-2(1H)-pyridone nucleobase
  modified_base order(10..15,20,22..27): mod_base = OTHER; note = 2-Prime-Fluoro modified nucleoside
  modified_base order(6..9,19,28..30): mod_base = OTHER; note = 2-Prime-O-Methyl modified nucleoside
  modified_base order(1^2,29^30): mod_base = OTHER; note = (1,3-dimethylimidazolidin-2-ylidene) Phosphoramidate linkage
  modified_base order(6..16,17^18,20..29): mod_base = OTHER; note = Phosphorothioate linkage
  modified_base 18^19: mod_base = OTHER; note = Methylphosphonate linkage
  misc_feature 1..30: note = T3-05
attttggcatccagtcnccatgctgacagt

SEQ ID NO: 70 - DNA, 30 bp, synthetic construct; identical to SEQ ID NO: 69
  source 1..30: mol_type = other DNA
  misc_feature 17..18: note = DNA
  misc_feature order(1..16,19..30): note = RNA
  modified_base 1: mod_base = OTHER; note = 2-Prime-O-Methoxyethyl modified nucleoside
  modified_base 16: mod_base = OTHER; note = 2-Prime-O-Methoxyethyl modified 5-methyl Cytidine
  modified_base order(2..5,21): mod_base = OTHER; note = 2-Prime-O-Methoxyethyl modified 5-methyl Uridine
  modified_base 17: mod_base = OTHER; note = DNA nucleotide carrying a 6-amino-5-nitro-3-yl-2(1H)-pyridone nucleobase
  modified_base order(11,13,15,20,22,24,26): mod_base = OTHER; note = 2-Prime-Fluoro modified nucleoside
  modified_base order(6..10,12,14,19,23,25,27..30): mod_base = OTHER; note = 2-Prime-O-Methyl modified nucleoside
  modified_base order(1^2,29^30): mod_base = OTHER; note = (1,3-dimethylimidazolidin-2-ylidene) Phosphoramidate linkage
  modified_base order(6..16,17^18,20..29): mod_base = OTHER; note = Phosphorothioate linkage
  modified_base 18^19: mod_base = OTHER; note = Methylphosphonate linkage
  misc_feature 1..30: note = T3-06

SEQ ID NO: 71 - DNA, 30 bp, synthetic construct; identical to SEQ ID NO: 69
  source 1..30: mol_type = other DNA
  misc_feature 17..18: note = DNA
  misc_feature order(1..16,19..30): note = RNA
  modified_base 1: mod_base = OTHER; note = 2-Prime-O-Methoxyethyl modified nucleoside
  modified_base 16: mod_base = OTHER; note = 2-Prime-O-Methoxyethyl modified 5-methyl Cytidine
  modified_base order(2..5,21): mod_base = OTHER; note = 2-Prime-O-Methoxyethyl modified 5-methyl Uridine
  modified_base 17: mod_base = OTHER; note = DNA nucleotide carrying a 6-amino-5-nitro-3-yl-2(1H)-pyridone nucleobase
  modified_base order(10..15,20,22..27): mod_base = OTHER; note = 2-Prime-Fluoro modified nucleoside
  modified_base order(6..9,19,28..30): mod_base = OTHER; note = 2-Prime-O-Methyl modified nucleoside
  modified_base order(1^2,29^30): mod_base = OTHER; note = (1,3-dimethylimidazolidin-2-ylidene) Phosphoramidate linkage
  modified_base order(6..18,19..29): mod_base = OTHER; note = Phosphorothioate linkage
  modified_base 18^19: mod_base = OTHER; note = Methylphosphonate linkage
  misc_feature 1..30: note = T3-07

SEQ ID NO: 72 - DNA, 30 bp, synthetic construct; identical to SEQ ID NO: 69
  source 1..30: mol_type = other DNA
  misc_feature 17..18: note = DNA
  misc_feature order(1..16,19..30): note = RNA
  modified_base 1: mod_base = OTHER; note = 2-Prime-O-Methoxyethyl modified nucleoside
  modified_base 16: mod_base = OTHER; note = 2-Prime-O-Methoxyethyl modified 5-methyl Cytidine
  modified_base order(2..5,21): mod_base = OTHER; note = 2-Prime-O-Methoxyethyl modified 5-methyl Uridine
  modified_base 17: mod_base = OTHER; note = DNA nucleotide carrying a 6-amino-5-nitro-3-yl-2(1H)-pyridone nucleobase
  modified_base order(11,13,15,20,22,24,26): mod_base = OTHER; note = 2-Prime-Fluoro modified nucleoside
  modified_base order(6..10,12,14,19,23,25,27..30): mod_base = OTHER; note = 2-Prime-O-Methyl modified nucleoside
  modified_base order(1^2,29^30): mod_base = OTHER; note = (1,3-dimethylimidazolidin-2-ylidene) Phosphoramidate linkage
  modified_base order(6..18,19..29): mod_base = OTHER; note = Phosphorothioate linkage
  modified_base 18^19: mod_base = OTHER; note = Methylphosphonate linkage
  misc_feature 1..30: note = T3-08

SEQ ID NO: 73 - DNA, 28 bp, synthetic construct
  source 1..28: mol_type = other DNA
  misc_feature 15..16: note = DNA
  misc_feature order(1..14,17..28): note = RNA
  modified_base 4..5: mod_base = OTHER; note = 2-Prime-O-Methoxyethyl modified nucleoside
  modified_base 14: mod_base = OTHER; note = 2-Prime-O-Methoxyethyl modified 5-methyl Cytidine
  modified_base order(1..3,19): mod_base = OTHER; note = 2-Prime-O-Methoxyethyl modified 5-methyl Uridine
  modified_base 15: mod_base = OTHER; note = DNA nucleotide carrying a 6-amino-5-nitro-3-yl-2(1H)-pyridone nucleobase
  modified_base order(8..13,18,20..25): mod_base = OTHER; note = 2-Prime-Fluoro modified nucleoside
  modified_base order(6..7,17,26..28): mod_base = OTHER; note = 2-Prime-O-Methyl modified nucleoside
  modified_base order(1^2,27^28): mod_base = OTHER; note = (1,3-dimethylimidazolidin-2-ylidene) Phosphoramidate linkage
  modified_base order(6..14,15^16,18..27): mod_base = OTHER; note = Phosphorothioate linkage
  modified_base 16^17: mod_base = OTHER; note = Methylphosphonate linkage
  misc_feature 1..28: note = T3-09
tttggcatccagtcnccatgctgacagt

SEQ ID NO: 74 - DNA, 28 bp, synthetic construct
  source 1..28: mol_type = other DNA
  misc_feature 15..16: note = DNA
  misc_feature order(1..14,17..28): note = RNA
  modified_base 4..5: mod_base = OTHER; note = 2-Prime-O-Methoxyethyl modified nucleoside
  modified_base 14: mod_base = OTHER; note = 2-Prime-O-Methoxyethyl modified 5-methyl Cytidine
  modified_base order(1..3,19): mod_base = OTHER; note = 2-Prime-O-Methoxyethyl modified 5-methyl Uridine
  modified_base 15: mod_base = OTHER; note = DNA nucleotide carrying a 6-amino-5-nitro-3-yl-2(1H)-pyridone nucleobase
  modified_base order(9,11,13,18,20,22,24): mod_base = OTHER; note = 2-Prime-Fluoro modified nucleoside
  modified_base order(6..8,10,12,17,21,23,25..28): mod_base = OTHER; note = 2-Prime-O-Methyl modified nucleoside
  modified_base order(1^2,27^28): mod_base = OTHER; note = (1,3-dimethylimidazolidin-2-ylidene) Phosphoramidate linkage
  modified_base order(6..14,15^16,18..27): mod_base = OTHER; note = Phosphorothioate linkage
  modified_base 16^17: mod_base = OTHER; note = Methylphosphonate linkage
  misc_feature 1..28: note = T3-10
tttggcatccagtcnccatgctgacagt

SEQ ID NO: 75 - DNA, 28 bp, synthetic construct
  source 1..28: mol_type = other DNA
  misc_feature 15..16: note = DNA
  misc_feature order(1..14,17..28): note = RNA
  modified_base 4..5: mod_base = OTHER; note = 2-Prime-O-Methoxyethyl modified nucleoside
  modified_base 14: mod_base = OTHER; note = 2-Prime-O-Methoxyethyl modified 5-methyl Cytidine
  modified_base order(1..3,19): mod_base = OTHER; note = 2-Prime-O-Methoxyethyl modified 5-methyl Uridine
  modified_base 15: mod_base = OTHER; note = DNA nucleotide carrying a 6-amino-5-nitro-3-yl-2(1H)-pyridone nucleobase
  modified_base order(8..13,18,20..25): mod_base = OTHER; note = 2-Prime-Fluoro modified nucleoside
  modified_base order(6..7,17,26..28): mod_base = OTHER; note = 2-Prime-O-Methyl modified nucleoside
  modified_base order(1^2,27^28): mod_base = OTHER; note = (1,3-dimethylimidazolidin-2-ylidene) Phosphoramidate linkage
  modified_base order(6..16,17..27): mod_base = OTHER; note = Phosphorothioate linkage
  modified_base 16^17: mod_base = OTHER; note = Methylphosphonate linkage
  misc_feature 1..28: note = T3-11
tttggcatccagtcnccatgctgacagt

SEQ ID NO: 76 - DNA, 28 bp, synthetic construct
  source 1..28: mol_type = other DNA
  misc_feature 15..16: note = DNA
  misc_feature order(1..14,17..28): note = RNA
  modified_base 4..5: mod_base = OTHER; note = 2-Prime-O-Methoxyethyl modified nucleoside
  modified_base 14: mod_base = OTHER; note = 2-Prime-O-Methoxyethyl modified 5-methyl Cytidine
  modified_base order(1..3,19): mod_base = OTHER; note = 2-Prime-O-Methoxyethyl modified 5-methyl Uridine
  modified_base 15: mod_base = OTHER; note = DNA nucleotide carrying a 6-amino-5-nitro-3-yl-2(1H)-pyridone nucleobase
  modified_base order(9,11,13,18,20,22,24): mod_base = OTHER; note = 2-Prime-Fluoro modified nucleoside
  modified_base order(6..8,10,12,17,21,23,25..28): mod_base = OTHER; note = 2-Prime-O-Methyl modified nucleoside
  modified_base order(1^2,27^28): mod_base = OTHER; note = (1,3-dimethylimidazolidin-2-ylidene) Phosphoramidate linkage
  modified_base order(6..16,17..27): mod_base = OTHER; note = Phosphorothioate linkage
  modified_base 16^17: mod_base = OTHER; note = Methylphosphonate linkage
  misc_feature 1..28: note = T3-12
tttggcatccagtcnccatgctgacagt

SEQ ID NO: 77 - DNA, 26 bp, synthetic construct
  source 1..26: mol_type = other DNA
  misc_feature 13..14: note = DNA
  misc_feature order(1..12,15..26): note = RNA
  modified_base 2..3: mod_base = OTHER; note = 2-Prime-O-Methoxyethyl modified nucleoside
  modified_base 12: mod_base = OTHER; note = 2-Prime-O-Methoxyethyl modified 5-methyl Cytidine
  modified_base order(1,17): mod_base = OTHER; note = 2-Prime-O-Methoxyethyl modified 5-methyl Uridine
  modified_base 13: mod_base = OTHER; note = DNA nucleotide carrying a 6-amino-5-nitro-3-yl-2(1H)-pyridone nucleobase
  modified_base order(6..11,16,18..23): mod_base = OTHER; note = 2-Prime-Fluoro modified nucleoside
  modified_base order(4..5,15,24..26): mod_base = OTHER; note = 2-Prime-O-Methyl modified nucleoside
  modified_base order(1^2,25^26): mod_base = OTHER; note = (1,3-dimethylimidazolidin-2-ylidene) Phosphoramidate linkage
  modified_base order(4..12,13^14,16..25): mod_base = OTHER; note = Phosphorothioate linkage
  modified_base 14^15: mod_base = OTHER; note = Methylphosphonate linkage
  misc_feature 1..26: note = T3-13
tggcatccagtcnccatgctgacagt

SEQ ID NO: 78 - DNA, 26 bp, synthetic construct
  source 1..26: mol_type = other DNA
  misc_feature 13..14: note = DNA
  misc_feature order(1..12,15..26): note = RNA
  modified_base 2..3: mod_base = OTHER; note = 2-Prime-O-Methoxyethyl modified nucleoside
  modified_base 12: mod_base = OTHER; note = 2-Prime-O-Methoxyethyl modified 5-methyl Cytidine
  modified_base order(1,17): mod_base = OTHER; note = 2-Prime-O-Methoxyethyl modified 5-methyl Uridine
  modified_base 13: mod_base = OTHER; note = DNA nucleotide carrying a 6-amino-5-nitro-3-yl-2(1H)-pyridone nucleobase
  modified_base order(7,9,11,16,18,20,22): mod_base = OTHER; note = 2-Prime-Fluoro modified nucleoside
  modified_base order(4..6,8,10,15,19,21,23..26): mod_base = OTHER; note = 2-Prime-O-Methyl modified nucleoside
  modified_base order(1^2,25^26): mod_base = OTHER; note = (1,3-dimethylimidazolidin-2-ylidene) Phosphoramidate linkage
  modified_base order(4..12,13^14,16..25): mod_base = OTHER; note = Phosphorothioate linkage
  modified_base 14^15: mod_base = OTHER; note = Methylphosphonate linkage
  misc_feature 1..26: note = T3-14
tggcatccagtcnccatgctgacagt

SEQ ID NO: 79 - DNA, 26 bp, synthetic construct
  source 1..26: mol_type = other DNA
  misc_feature 13..14: note = DNA
  misc_feature order(1..12,15..26): note = RNA
  modified_base 2..3: mod_base = OTHER; note = 2-Prime-O-Methoxyethyl modified nucleoside
  modified_base 12: mod_base = OTHER; note = 2-Prime-O-Methoxyethyl modified 5-methyl Cytidine
  modified_base order(1,17): mod_base = OTHER; note = 2-Prime-O-Methoxyethyl modified 5-methyl Uridine
  modified_base 13: mod_base = OTHER; note = DNA nucleotide carrying a 6-amino-5-nitro-3-yl-2(1H)-pyridone nucleobase
  modified_base order(6..11,16,18..23): mod_base = OTHER; note = 2-Prime-Fluoro modified nucleoside
  modified_base order(4..5,15,24..26): mod_base = OTHER; note = 2-Prime-O-Methyl modified nucleoside
  modified_base order(1^2,25^26): mod_base = OTHER; note = (1,3-dimethylimidazolidin-2-ylidene) Phosphoramidate linkage
  modified_base order(4..14,15..25): mod_base = OTHER; note = Phosphorothioate linkage
  modified_base 14^15: mod_base = OTHER; note = Methylphosphonate linkage
  misc_feature 1..26: note = T3-15
tggcatccagtcnccatgctgacagt

SEQ ID NO: 80 - DNA, 26 bp, synthetic construct
  source 1..26: mol_type = other DNA
  misc_feature 13..14: note = DNA
  misc_feature order(1..12,15..26): note = RNA
  modified_base 2..3: mod_base = OTHER; note = 2-Prime-O-Methoxyethyl modified nucleoside
  modified_base 12: mod_base = OTHER; note = 2-Prime-O-Methoxyethyl modified 5-methyl Cytidine
  modified_base order(1,17): mod_base = OTHER; note = 2-Prime-O-Methoxyethyl modified 5-methyl Uridine
  modified_base 13: mod_base = OTHER; note = DNA nucleotide carrying a 6-amino-5-nitro-3-yl-2(1H)-pyridone nucleobase
  modified_base order(7,9,11,16,18,20,22): mod_base = OTHER; note = 2-Prime-Fluoro modified nucleoside
  modified_base order(4..6,8,10,15,19,21,23..26): mod_base = OTHER; note = 2-Prime-O-Methyl modified nucleoside
  modified_base order(1^2,25^26): mod_base = OTHER; note = (1,3-dimethylimidazolidin-2-ylidene) Phosphoramidate linkage
  modified_base order(4..14,15..25): mod_base = OTHER; note = Phosphorothioate linkage
  modified_base 14^15: mod_base = OTHER; note = Methylphosphonate linkage
  misc_feature 1..26: note = T3-16
tggcatccagtcnccatgctgacagt

SEQ ID NO: 81 - DNA, 30 bp, synthetic construct
  source 1..30: mol_type = other DNA
  misc_feature 19..20: note = DNA
  misc_feature order(1..18,21..30): note = RNA
  modified_base order(1,3): mod_base = OTHER; note = 2-Prime-O-Methoxyethyl modified nucleoside
  modified_base order(2,18): mod_base = OTHER; note = 2-Prime-O-Methoxyethyl modified 5-methyl Cytidine
  modified_base order(4..5,23): mod_base = OTHER; note = 2-Prime-O-Methoxyethyl modified 5-methyl Uridine
  modified_base 19: mod_base = OTHER; note = DNA nucleotide carrying a 6-amino-5-nitro-3-yl-2(1H)-pyridone nucleobase
  modified_base order(12..17,22,24..29): mod_base = OTHER; note = 2-Prime-Fluoro modified nucleoside
  modified_base order(6..11,21,30): mod_base = OTHER; note = 2-Prime-O-Methyl modified nucleoside
  modified_base order(1^2,29^30): mod_base = OTHER; note = (1,3-dimethylimidazolidin-2-ylidene) Phosphoramidate linkage
  modified_base order(6..18,19^20,22..29): mod_base = OTHER; note = Phosphorothioate linkage
  modified_base 20^21: mod_base = OTHER; note = Methylphosphonate linkage
  misc_feature 1..30: note = T3-17
acattttggcatccagtcnccatgctgaca

SEQ ID NO: 82 - DNA, 30 bp, synthetic construct; identical to SEQ ID NO: 81
  source 1..30: mol_type = other DNA
  misc_feature 19..20: note = DNA
  misc_feature order(1..18,21..30): note = RNA
  modified_base order(1,3): mod_base = OTHER; note = 2-Prime-O-Methoxyethyl modified nucleoside
  modified_base order(2,18): mod_base = OTHER; note = 2-Prime-O-Methoxyethyl modified 5-methyl Cytidine
  modified_base order(4..5,23): mod_base = OTHER; note = 2-Prime-O-Methoxyethyl modified 5-methyl Uridine
  modified_base 19: mod_base = OTHER; note = DNA nucleotide carrying a 6-amino-5-nitro-3-yl-2(1H)-pyridone nucleobase
  modified_base order(13,15,17,22,24,26,28): mod_base = OTHER; note = 2-Prime-Fluoro modified nucleoside
  modified_base order(6..12,14,16,21,25,27,29..30): mod_base = OTHER; note = 2-Prime-O-Methyl modified nucleoside
  modified_base order(1^2,29^30): mod_base = OTHER; note = (1,3-dimethylimidazolidin-2-ylidene) Phosphoramidate linkage
  modified_base order(6..18,19^20,22..29): mod_base = OTHER; note = Phosphorothioate linkage
  modified_base 20^21: mod_base = OTHER; note = Methylphosphonate linkage
  misc_feature 1..30: note = T3-18

SEQ ID NO: 83 - DNA, 30 bp, synthetic construct; identical to SEQ ID NO: 81
  source 1..30: mol_type = other DNA
  misc_feature 19..20: note = DNA
  misc_feature order(1..18,21..30): note = RNA
  modified_base order(1,3): mod_base = OTHER; note = 2-Prime-O-Methoxyethyl modified nucleoside
  modified_base order(2,18): mod_base = OTHER; note = 2-Prime-O-Methoxyethyl modified 5-methyl Cytidine
  modified_base order(4..5,23): mod_base = OTHER; note = 2-Prime-O-Methoxyethyl modified 5-methyl Uridine
  modified_base 19: mod_base = OTHER; note = DNA nucleotide carrying a 6-amino-5-nitro-3-yl-2(1H)-pyridone nucleobase
  modified_base order(12..17,22,24..29): mod_base = OTHER; note = 2-Prime-Fluoro modified nucleoside
  modified_base order(6..11,21,30): mod_base = OTHER; note = 2-Prime-O-Methyl modified nucleoside
  modified_base order(1^2,29^30): mod_base = OTHER; note = (1,3-dimethylimidazolidin-2-ylidene) Phosphoramidate linkage
  modified_base order(6..20,21..29): mod_base = OTHER; note = Phosphorothioate linkage
  modified_base 20^21: mod_base = OTHER; note = Methylphosphonate linkage
  misc_feature 1..30: note = T3-19

SEQ ID NO: 84 - DNA, 30 bp, synthetic construct; identical to SEQ ID NO: 81
  source 1..30: mol_type = other DNA
  misc_feature 19..20: note = DNA
  misc_feature order(1..18,21..30): note = RNA
  modified_base order(1,3): mod_base = OTHER; note = 2-Prime-O-Methoxyethyl modified nucleoside
  modified_base order(2,18): mod_base = OTHER; note = 2-Prime-O-Methoxyethyl modified 5-methyl Cytidine
  modified_base order(4..5,23): mod_base = OTHER; note = 2-Prime-O-Methoxyethyl modified 5-methyl Uridine
  modified_base 19: mod_base = OTHER; note = DNA nucleotide carrying a 6-amino-5-nitro-3-yl-2(1H)-pyridone nucleobase
  modified_base order(13,15,17,22,24,26,28): mod_base = OTHER; note = 2-Prime-Fluoro modified nucleoside
  modified_base order(6..12,14,16,21,25,27,29..30): mod_base = OTHER; note = 2-Prime-O-Methyl modified nucleoside
  modified_base order(1^2,29^30): mod_base = OTHER; note = (1,3-dimethylimidazolidin-2-ylidene) Phosphoramidate linkage
  modified_base order(6..20,21..29): mod_base = OTHER; note = Phosphorothioate linkage
  modified_base 20^21: mod_base = OTHER; note = Methylphosphonate linkage
  misc_feature 1..30: note = T3-20

SEQ ID NO: 85 - DNA, 28 bp, synthetic construct
  source 1..28: mol_type = other DNA
  misc_feature 19..20: note = DNA
  misc_feature order(1..18,21..28): note = RNA
  modified_base order(1,3): mod_base = OTHER; note = 2-Prime-O-Methoxyethyl modified nucleoside
  modified_base order(2,18): mod_base = OTHER; note = 2-Prime-O-Methoxyethyl modified 5-methyl Cytidine
  modified_base order(4..5,23): mod_base = OTHER; note = 2-Prime-O-Methoxyethyl modified 5-methyl Uridine
  modified_base 19: mod_base = OTHER; note = DNA nucleotide carrying a 6-amino-5-nitro-3-yl-2(1H)-pyridone nucleobase
  modified_base order(12..17,22,24..28): mod_base = OTHER; note = 2-Prime-Fluoro modified nucleoside
  modified_base order(6..11,21): mod_base = OTHER; note = 2-Prime-O-Methyl modified nucleoside
  modified_base order(1^2,27^28): mod_base = OTHER; note = (1,3-dimethylimidazolidin-2-ylidene) Phosphoramidate linkage
  modified_base order(6..18,19^20,22..27): mod_base = OTHER; note = Phosphorothioate linkage
  modified_base 20^21: mod_base = OTHER; note = Methylphosphonate linkage
  misc_feature 1..28: note = T3-21
acattttggcatccagtcnccatgctga

SEQ ID NO: 86 - DNA, 28 bp, synthetic construct
  source 1..28: mol_type = other DNA
  misc_feature 19..20: note = DNA
  misc_feature order(1..18,21..28): note = RNA
  modified_base order(1,3): mod_base = OTHER; note = 2-Prime-O-Methoxyethyl modified nucleoside
  modified_base order(2,18): mod_base = OTHER; note = 2-Prime-O-Methoxyethyl modified 5-methyl Cytidine
  modified_base order(4..5,23): mod_base = OTHER; note = 2-Prime-O-Methoxyethyl modified 5-methyl Uridine
  modified_base 19: mod_base = OTHER; note = DNA nucleotide carrying a 6-amino-5-nitro-3-yl-2(1H)-pyridone nucleobase
  modified_base order(13,15,17,22,24,26,28): mod_base = OTHER; note = 2-Prime-Fluoro modified nucleoside
  modified_base order(6..12,14,16,21,25,27): mod_base = OTHER; note = 2-Prime-O-Methyl modified nucleoside
  modified_base order(1^2,27^28): mod_base = OTHER; note = (1,3-dimethylimidazolidin-2-ylidene) Phosphoramidate linkage
  modified_base order(6..18,19^20,22..27): mod_base = OTHER; note = Phosphorothioate linkage
  modified_base 20^21: mod_base = OTHER; note = Methylphosphonate linkage
  misc_feature 1..28: note = T3-22
acattttggcatccagtcnccatgctga

SEQ ID NO: 87 - DNA, 28 bp, synthetic construct
  source 1..28: mol_type = other DNA
  misc_feature 19..20: note = DNA
  misc_feature order(1..18,21..28): note = RNA
  modified_base order(1,3): mod_base = OTHER; note = 2-Prime-O-Methoxyethyl modified nucleoside
  modified_base order(2,18): mod_base = OTHER; note = 2-Prime-O-Methoxyethyl modified 5-methyl Cytidine
  modified_base order(4..5,23): mod_base = OTHER; note = 2-Prime-O-Methoxyethyl modified 5-methyl Uridine
  modified_base 19: mod_base = OTHER; note = DNA nucleotide carrying a 6-amino-5-nitro-3-yl-2(1H)-pyridone nucleobase
  modified_base order(12..17,22,24..28): mod_base = OTHER; note = 2-Prime-Fluoro modified nucleoside
  modified_base order(6..11,21): mod_base = OTHER; note = 2-Prime-O-Methyl modified nucleoside
  modified_base order(1^2,27^28): mod_base = OTHER; note = (1,3-dimethylimidazolidin-2-ylidene) Phosphoramidate linkage
  modified_base order(6..20,21..27): mod_base = OTHER; note = Phosphorothioate linkage
  modified_base 20^21: mod_base = OTHER; note = Methylphosphonate linkage
  misc_feature 1..28: note = T3-23
acattttggcatccagtcnccatgctga

SEQ ID NO: 88 - DNA, 28 bp, synthetic construct
  source 1..28: mol_type = other DNA
  misc_feature 19..20: note = DNA
  misc_feature order(1..18,21..28): note = RNA
  modified_base order(1,3): mod_base = OTHER; note = 2-Prime-O-Methoxyethyl modified nucleoside
  modified_base order(2,18): mod_base = OTHER; note = 2-Prime-O-Methoxyethyl modified 5-methyl Cytidine
  modified_base order(4..5,23): mod_base = OTHER; note = 2-Prime-O-Methoxyethyl modified 5-methyl Uridine
  modified_base 19: mod_base = OTHER; note = DNA nucleotide carrying a 6-amino-5-nitro-3-yl-2(1H)-pyridone nucleobase
  modified_base order(13,15,17,22,24,26,28): mod_base = OTHER; note = 2-Prime-Fluoro modified nucleoside
  modified_base order(6..12,14,16,21,25,27): mod_base = OTHER; note = 2-Prime-O-Methyl modified nucleoside
  modified_base order(1^2,27^28): mod_base = OTHER; note = (1,3-dimethylimidazolidin-2-ylidene) Phosphoramidate linkage
  modified_base order(6..20,21..27): mod_base = OTHER; note = Phosphorothioate linkage
  modified_base 20^21: mod_base = OTHER; note = Methylphosphonate linkage
  misc_feature 1..28: note = T3-24
acattttggcatccagtcnccatgctga

SEQ ID NO: 89 - DNA, 30 bp, synthetic construct
  source 1..30: mol_type = other DNA
  misc_feature 24..25: note = DNA
  misc_feature order(1..23,26..30): note = RNA
  modified_base 23: mod_base = OTHER; note = 2-Prime-O-Methoxyethyl modified 5-methyl Cytidine
  modified_base 28: mod_base = OTHER; note = 2-Prime-O-Methoxyethyl modified 5-methyl Uridine
  modified_base 24: mod_base = OTHER; note = DNA nucleotide carrying a 6-amino-5-nitro-3-yl-2(1H)-pyridone nucleobase
  modified_base order(5..6,9..10,13..14,17..22,27): mod_base = OTHER; note = 2-Prime-Fluoro modified nucleoside
  modified_base order(1..4,7..8,11..12,15..16,26,29..30): mod_base = OTHER; note = 2-Prime-O-Methyl modified nucleoside
  modified_base order(1^2,29^30): mod_base = OTHER; note = (1,3-dimethylimidazolidin-2-ylidene) Phosphoramidate linkage
  modified_base order(2..23,24^25,27..29): mod_base = OTHER; note = Phosphorothioate linkage
  modified_base 25^26: mod_base = OTHER; note = Methylphosphonate linkage
  misc_feature 1..30: note = T3-25
gttggacattttggcatccagtcnccatgc

SEQ ID NO: 90 - DNA, 30 bp, synthetic construct; identical to SEQ ID NO: 89
  source 1..30: mol_type = other DNA
  misc_feature 24..25: note = DNA
  misc_feature order(1..23,26..30): note = RNA
  modified_base 23: mod_base = OTHER; note = 2-Prime-O-Methoxyethyl modified 5-methyl Cytidine
  modified_base 28: mod_base = OTHER; note = 2-Prime-O-Methoxyethyl modified 5-methyl Uridine
  modified_base 24: mod_base = OTHER; note = DNA nucleotide carrying a 6-amino-5-nitro-3-yl-2(1H)-pyridone nucleobase
  modified_base order(4..5,8..9,11..15,18..19,22,27): mod_base = OTHER; note = 2-Prime-Fluoro modified nucleoside
  modified_base order(1..3,6..7,10,16..17,20..21,26,29..30): mod_base = OTHER; note = 2-Prime-O-Methyl modified nucleoside
  modified_base order(1^2,11^12,14^15,29^30): mod_base = OTHER; note = (1,3-dimethylimidazolidin-2-ylidene) Phosphoramidate linkage
  modified_base order(2..6,8..11,12^13,18..20,21..23,24^25,27..29): mod_base = OTHER; note = Phosphorothioate linkage
  modified_base 25^26: mod_base = OTHER; note = Methylphosphonate linkage
  misc_feature 1..30: note = T3-26

SEQ ID NO: 91 - DNA, 30 bp, synthetic construct; identical to SEQ ID NO: 89
  source 1..30: mol_type = other DNA
  misc_feature 24..25: note = DNA
  misc_feature order(1..23,26..30): note = RNA
  modified_base 23: mod_base = OTHER; note = 2-Prime-O-Methoxyethyl modified 5-methyl Cytidine
  modified_base 28: mod_base = OTHER; note = 2-Prime-O-Methoxyethyl modified 5-methyl Uridine
  modified_base 24: mod_base = OTHER; note = DNA nucleotide carrying a 6-amino-5-nitro-3-yl-2(1H)-pyridone nucleobase
  modified_base order(4..6,8..9,11,13..15,18..20,22,27): mod_base = OTHER; note = 2-Prime-Fluoro modified nucleoside
  modified_base order(1..3,7,10,12,16..17,21,26,29..30): mod_base = OTHER; note = 2-Prime-O-Methyl modified nucleoside
  modified_base order(1^2,11^12,14^15,29^30): mod_base = OTHER; note = (1,3-dimethylimidazolidin-2-ylidene) Phosphoramidate linkage
  modified_base order(2..6,7..9,10^11,13^14,16..21,22^23,24^25,27..29): mod_base = OTHER; note = Phosphorothioate linkage
  modified_base 25^26: mod_base = OTHER; note = Methylphosphonate linkage
  misc_feature 1..30: note = T3-27

SEQ ID NO: 92 - DNA, 30 bp, synthetic construct; identical to SEQ ID NO: 89
  source 1..30: mol_type = other DNA
  misc_feature 24..25: note = DNA
  misc_feature order(1..23,26..30): note = RNA
  modified_base order(6,16,21): mod_base = OTHER; note = 2-Prime-O-Methoxyethyl modified nucleoside
  modified_base order(7,23): mod_base = OTHER; note = 2-Prime-O-Methoxyethyl modified 5-methyl Cytidine
  modified_base 28: mod_base = OTHER; note = 2-Prime-O-Methoxyethyl modified 5-methyl Uridine
  modified_base 24: mod_base = OTHER; note = DNA nucleotide carrying a 6-amino-5-nitro-3-yl-2(1H)-pyridone nucleobase
  modified_base order(4..5,8..9,13..15,17,19,22,27): mod_base = OTHER; note = 2-Prime-Fluoro modified nucleoside
  modified_base order(1..3,10..12,18,20,26,29..30): mod_base = OTHER; note = 2-Prime-O-Methyl modified nucleoside
  modified_base order(1^2,11^12,14^15,19^20,29^30): mod_base = OTHER; note = (1,3-dimethylimidazolidin-2-ylidene) Phosphoramidate linkage
  modified_base order(2..6,8..10,13^14,16..18,22^23,24^25,27..29): mod_base = OTHER; note = Phosphorothioate linkage
  modified_base 25^26: mod_base = OTHER; note = Methylphosphonate linkage
  misc_feature 1..30: note = T3-28

SEQ ID NO: 93 - DNA, 30 bp, synthetic construct; identical to SEQ ID NO: 89
  source 1..30: mol_type = other DNA
  misc_feature 24..25: note = DNA
  misc_feature order(1..23,26..30): note = RNA
  modified_base order(6,16,20..21): mod_base = OTHER; note = 2-Prime-O-Methoxyethyl modified nucleoside
  modified_base order(7,23): mod_base = OTHER; note = 2-Prime-O-Methoxyethyl modified 5-methyl Cytidine
  modified_base order(10,28): mod_base = OTHER; note = 2-Prime-O-Methoxyethyl modified 5-methyl Uridine
  modified_base 24: mod_base = OTHER; note = DNA nucleotide carrying a 6-amino-5-nitro-3-yl-2(1H)-pyridone nucleobase
  modified_base order(4..5,8..9,11,13..15,17..19,22,27): mod_base = OTHER; note = 2-Prime-Fluoro modified nucleoside
  modified_base order(1..3,12,26,29..30): mod_base = OTHER; note = 2-Prime-O-Methyl modified nucleoside
  modified_base order(1^2,11^12,14^15,19^20,29^30): mod_base = OTHER; note = (1,3-dimethylimidazolidin-2-ylidene) Phosphoramidate linkage
  modified_base order(2..6,8..10,13^14,16..19,22^23,24^25,27..29): mod_base = OTHER; note = Phosphorothioate linkage
  modified_base 25^26: mod_base = OTHER; note = Methylphosphonate linkage
  misc_feature 1..30: note = T3-29

SEQ ID NO: 94 - DNA, 27 bp, synthetic construct
  source 1..27: mol_type = other DNA
  misc_feature 16..17: note = DNA
  misc_feature order(1..15,18..27): note = RNA
  modified_base order(8,12..13): mod_base = OTHER; note = 2-Prime-O-Methoxyethyl modified nucleoside
  modified_base 15: mod_base = OTHER; note = 2-Prime-O-Methoxyethyl modified 5-methyl Cytidine
  modified_base order(1..2,4,9,20): mod_base = OTHER; note = 2-Prime-O-Methoxyethyl modified 5-methyl Uridine
  modified_base 16: mod_base = OTHER; note = DNA nucleotide carrying a 6-amino-5-nitro-3-yl-2(1H)-pyridone nucleobase
  modified_base order(5..6,14,19,21,23,25): mod_base = OTHER; note = 2-Prime-Fluoro modified nucleoside
  modified_base order(3,7,10..11,18,22,24,26..27): mod_base = OTHER; note = 2-Prime-O-Methyl modified nucleoside
  modified_base order(2^3,5^6,9..12,14..17,18..26): mod_base = OTHER; note = Phosphorothioate linkage
  modified_base order(3^4,6^7,26^27): mod_base = OTHER; note = (1,3-dimethylimidazolidin-2-ylidene) Phosphoramidate linkage
  modified_base 17^18: mod_base = OTHER; note = Methylphosphonate linkage
  misc_feature 1..27: note = T3-30
ttttggcatccagtcnccatgctgaca

SEQ ID NO: 95 - DNA, 32 bp, synthetic construct
  source 1..32: mol_type = other DNA
  misc_feature 19..20: note = DNA
  misc_feature order(1..18,21..32): note = RNA
  modified_base order(3,23): mod_base = OTHER; note = 2-Prime-O-Methoxyethyl modified nucleoside
  modified_base 2: mod_base = OTHER; note = 2-Prime-O-Methoxyethyl modified 5-methyl Cytidine
  modified_base order(1,4..5,18): mod_base = OTHER; note = 2-Prime-O-Methoxyethyl modified 5-methyl Uridine
  modified_base 19: mod_base = OTHER; note = DNA nucleotide carrying a 6-amino-5-nitro-3-yl-2(1H)-pyridone nucleobase
  modified_base 20: mod_base = OTHER; note = DNA nucleotide carrying a hypoxanthine nucleobase
  modified_base order(12..17,22,24..29): mod_base = OTHER; note = 2-Prime-Fluoro modified nucleoside
  modified_base order(6..11,21,30..32): mod_base = OTHER; note = 2-Prime-O-Methyl modified nucleoside
  modified_base order(1^2,31^32): mod_base = OTHER; note = (1,3-dimethylimidazolidin-2-ylidene) Phosphoramidate linkage
  modified_base order(6..18,19^20,22..31): mod_base = OTHER; note = Phosphorothioate linkage
  modified_base 20^21: mod_base = OTHER; note = Methylphosphonate linkage
  misc_feature 1..32: note = T4-01
tcatttttgttttatcctnnggagtcttgaat

SEQ ID NO: 96 - DNA, 32 bp, synthetic construct; identical to SEQ ID NO: 95
  source 1..32: mol_type = other DNA
  misc_feature 19..20: note = DNA
  misc_feature order(1..18,21..32): note = RNA
  modified_base order(3,23): mod_base = OTHER; note = 2-Prime-O-Methoxyethyl modified nucleoside
  modified_base 2: mod_base = OTHER; note = 2-Prime-O-Methoxyethyl modified 5-methyl Cytidine
  modified_base order(1,4..5,18): mod_base = OTHER; note = 2-Prime-O-Methoxyethyl modified 5-methyl Uridine
  modified_base 19: mod_base = OTHER; note = DNA nucleotide carrying a 6-amino-5-nitro-3-yl-2(1H)-pyridone nucleobase
  modified_base 20: mod_base = OTHER; note = DNA nucleotide carrying a hypoxanthine nucleobase
  modified_base order(13,15,17,22,24,26,28): mod_base = OTHER; note = 2-Prime-Fluoro modified nucleoside
  modified_base order(6..12,14,16,21,25,27,29..32): mod_base = OTHER; note = 2-Prime-O-Methyl modified nucleoside
  modified_base order(1^2,31^32): mod_base = OTHER; note = (1,3-dimethylimidazolidin-2-ylidene) Phosphoramidate linkage
  modified_base order(6..18,19^20,22..31): mod_base = OTHER; note = Phosphorothioate linkage
  modified_base 20^21: mod_base = OTHER; note = Methylphosphonate linkage
  misc_feature 1..32: note = T4-02

SEQ ID NO: 97 - DNA, 32 bp, synthetic construct; identical to SEQ ID NO: 95
  source 1..32: mol_type = other DNA
  misc_feature 19..20: note = DNA
  misc_feature order(1..18,21..32): note = RNA
  modified_base order(3,23): mod_base = OTHER; note = 2-Prime-O-Methoxyethyl modified nucleoside
  modified_base 2: mod_base = OTHER; note = 2-Prime-O-Methoxyethyl modified 5-methyl Cytidine
  modified_base order(1,4..5,18): mod_base = OTHER; note = 2-Prime-O-Methoxyethyl modified 5-methyl Uridine
  modified_base 19: mod_base = OTHER; note = DNA nucleotide carrying a 6-amino-5-nitro-3-yl-2(1H)-pyridone nucleobase
  modified_base 20: mod_base = OTHER; note = DNA nucleotide carrying a hypoxanthine nucleobase
  modified_base order(12..17,22,24..29): mod_base = OTHER; note = 2-Prime-Fluoro modified nucleoside
  modified_base order(6..11,21,30..32): mod_base = OTHER; note = 2-Prime-O-Methyl modified nucleoside
  modified_base order(1^2,31^32): mod_base = OTHER; note = (1,3-dimethylimidazolidin-2-ylidene) Phosphoramidate linkage
  modified_base order(6..20,21..31): mod_base = OTHER; note = Phosphorothioate linkage
  modified_base 20^21: mod_base = OTHER; note = Methylphosphonate linkage
  misc_feature 1..32: note = T4-03

SEQ ID NO: 98 - DNA, 32 bp, synthetic construct; identical to SEQ ID NO: 95
  source 1..32: mol_type = other DNA
  misc_feature 19..20: note = DNA
  misc_feature order(1..18,21..32): note = RNA
  modified_base order(3,23): mod_base = OTHER; note = 2-Prime-O-Methoxyethyl modified nucleoside
  modified_base 2: mod_base = OTHER; note = 2-Prime-O-Methoxyethyl modified 5-methyl Cytidine
  modified_base order(1,4..5,18): mod_base = OTHER; note = 2-Prime-O-Methoxyethyl modified 5-methyl Uridine
  modified_base 19: mod_base = OTHER; note = DNA nucleotide carrying a 6-amino-5-nitro-3-yl-2(1H)-pyridone nucleobase
  modified_base 20: mod_base = OTHER; note = DNA nucleotide carrying a hypoxanthine nucleobase
  modified_base order(13,15,17,22,24,26,28): mod_base = OTHER; note = 2-Prime-Fluoro modified nucleoside
  modified_base order(6..12,14,16,21,25,27,29..32): mod_base = OTHER; note = 2-Prime-O-Methyl modified nucleoside
  modified_base order(1^2,31^32): mod_base = OTHER; note = (1,3-dimethylimidazolidin-2-ylidene) Phosphoramidate linkage
  modified_base order(6..20,21..31): mod_base = OTHER; note = Phosphorothioate linkage
  modified_base 20^21: mod_base = OTHER; note = Methylphosphonate linkage
  misc_feature 1..32: note = T4-04

SEQ ID NO: 99 - DNA, 30 bp, synthetic construct
  source 1..30: mol_type = other DNA
  misc_feature 17..18: note = DNA
  misc_feature order(1..16,19..30): note = RNA
  modified_base order(1,21): mod_base = OTHER; note = 2-Prime-O-Methoxyethyl modified nucleoside
  modified_base order(2..5,16): mod_base = OTHER; note = 2-Prime-O-Methoxyethyl modified 5-methyl Uridine
  modified_base 17: mod_base = OTHER; note = DNA nucleotide carrying a 6-amino-5-nitro-3-yl-2(1H)-pyridone nucleobase
  modified_base 18: mod_base = OTHER; note = DNA nucleotide carrying a hypoxanthine nucleobase
  modified_base order(10..15,20,22..27): mod_base = OTHER; note = 2-Prime-Fluoro modified nucleoside
  modified_base order(6..9,19,28..30): mod_base = OTHER; note = 2-Prime-O-Methyl modified nucleoside
  modified_base order(1^2,29^30): mod_base = OTHER; note = (1,3-dimethylimidazolidin-2-ylidene) Phosphoramidate linkage
  modified_base order(6..16,17^18,20..29): mod_base = OTHER; note = Phosphorothioate linkage
  modified_base 18^19: mod_base = OTHER; note = Methylphosphonate linkage
  misc_feature 1..30: note = T4-05
atttttgttttatcctnnggagtcttgaat

SEQ ID NO: 100 - DNA, 30 bp, synthetic construct; identical to SEQ ID NO: 99
  source 1..30: mol_type = other DNA
  misc_feature 17..18: note = DNA
  misc_feature order(1..16,19..30): note = RNA
  modified_base order(1,21): mod_base = OTHER; note = 2-Prime-O-Methoxyethyl modified nucleoside
  modified_base order(2..5,16): mod_base = OTHER; note = 2-Prime-O-Methoxyethyl modified 5-methyl Uridine
  modified_base 17: mod_base = OTHER; note = DNA nucleotide carrying a 6-amino-5-nitro-3-yl-2(1H)-pyridone nucleobase
  modified_base 18: mod_base = OTHER; note = DNA nucleotide carrying a hypoxanthine nucleobase
  modified_base order(11,13,15,20,22,24,26): mod_base = OTHER; note = 2-Prime-Fluoro modified nucleoside
  modified_base order(6..10,12,14,19,23,25,27..30): mod_base = OTHER; note = 2-Prime-O-Methyl modified nucleoside
  modified_base order(1^2,29^30): mod_base = OTHER; note = (1,3-dimethylimidazolidin-2-ylidene) Phosphoramidate linkage
  modified_base order(6..16,17^18,20..29): mod_base = OTHER; note = Phosphorothioate linkage
  modified_base 18^19: mod_base = OTHER; note = Methylphosphonate linkage
  misc_feature 1..30: note = T4-06

SEQ ID NO: 101 - DNA, 30 bp, synthetic construct; identical to SEQ ID NO: 99
  source 1..30: mol_type = other DNA
  misc_feature 17..18: note = DNA
  misc_feature order(1..16,19..30): note = RNA
  modified_base order(1,21): mod_base = OTHER; note = 2-Prime-O-Methoxyethyl modified nucleoside
  modified_base order(2..5,16): mod_base = OTHER; note = 2-Prime-O-Methoxyethyl modified 5-methyl Uridine
  modified_base 17: mod_base = OTHER; note = DNA nucleotide carrying a 6-amino-5-nitro-3-yl-2(1H)-pyridone nucleobase
  modified_base 18: mod_base = OTHER; note = DNA nucleotide carrying a hypoxanthine nucleobase
  modified_base order(10..15,20,22..27): mod_base = OTHER; note = 2-Prime-Fluoro modified nucleoside
  modified_base order(6..9,19,28..30): mod_base = OTHER; note = 2-Prime-O-Methyl modified nucleoside
  modified_base order(1^2,29^30): mod_base = OTHER; note = (1,3-dimethylimidazolidin-2-ylidene) Phosphoramidate linkage
  modified_base order(6..18,19..29): mod_base = OTHER; note = Phosphorothioate linkage
  modified_base 18^19: mod_base = OTHER; note = Methylphosphonate linkage
  misc_feature 1..30: note = T4-07

SEQ ID NO: 102 - DNA, 30 bp, synthetic construct; identical to SEQ ID NO: 99
  source 1..30: mol_type = other DNA
  misc_feature 17..18: note = DNA
  misc_feature order(1..16,19..30): note = RNA
  modified_base order(1,21): mod_base = OTHER; note = 2-Prime-O-Methoxyethyl modified nucleoside
  modified_base order(2..5,16): mod_base = OTHER; note = 2-Prime-O-Methoxyethyl modified 5-methyl Uridine
  modified_base 17: mod_base = OTHER; note = DNA nucleotide carrying a 6-amino-5-nitro-3-yl-2(1H)-pyridone nucleobase
  modified_base 18: mod_base = OTHER; note = DNA nucleotide carrying a hypoxanthine nucleobase
  modified_base order(11,13,15,20,22,24,26): mod_base = OTHER; note = 2-Prime-Fluoro modified nucleoside
  modified_base order(6..10,12,14,19,23,25,27..30): mod_base = OTHER; note = 2-Prime-O-Methyl modified nucleoside
  modified_base order(1^2,29^30): mod_base = OTHER; note = (1,3-dimethylimidazolidin-2-ylidene) Phosphoramidate linkage
  modified_base order(6..18,19..29): mod_base = OTHER; note = Phosphorothioate linkage
  modified_base 18^19: mod_base = OTHER; note = Methylphosphonate linkage
  misc_feature 1..30: note = T4-08

SEQ ID NO: 103 - DNA, 28 bp, synthetic construct
  source 1..28: mol_type = other DNA
  misc_feature 15..16: note = DNA
  misc_feature order(1..14,17..28): note = RNA
  modified_base order(5,19): mod_base = OTHER; note = 2-Prime-O-Methoxyethyl modified nucleoside
  modified_base order(1..4,14): mod_base = OTHER; note = 2-Prime-O-Methoxyethyl modified 5-methyl Uridine
  modified_base 15: mod_base = OTHER; note = DNA nucleotide carrying a 6-amino-5-nitro-3-yl-2(1H)-pyridone nucleobase
  modified_base 16: mod_base = OTHER; note = DNA nucleotide carrying a hypoxanthine nucleobase
  modified_base order(8..13,18,20..25): mod_base = OTHER; note = 2-Prime-Fluoro modified nucleoside
  modified_base order(6..7,17,26..28): mod_base = OTHER; note = 2-Prime-O-Methyl modified nucleoside
  modified_base order(1^2,27^28): mod_base = OTHER; note = (1,3-dimethylimidazolidin-2-ylidene) Phosphoramidate linkage
  modified_base order(6..14,15^16,18..27): mod_base = OTHER; note = Phosphorothioate linkage
  modified_base 16^17: mod_base = OTHER; note = Methylphosphonate linkage
  misc_feature 1..28: note = T4-09
ttttgttttatcctnnggagtcttgaat

SEQ ID NO: 104 - DNA, 28 bp, synthetic construct
  source 1..28: mol_type = other DNA
  misc_feature 15..16: note = DNA
  misc_feature order(1..14,17..28): note = RNA
  modified_base order(5,19): mod_base = OTHER; note = 2-Prime-O-Methoxyethyl modified nucleoside
  modified_base order(1..4,14): mod_base = OTHER; note = 2-Prime-O-Methoxyethyl modified 5-methyl Uridine
  modified_base 15: mod_base = OTHER; note = DNA nucleotide carrying a 6-amino-5-nitro-3-yl-2(1H)-pyridone nucleobase
  modified_base 16: mod_base = OTHER; note = DNA nucleotide carrying a hypoxanthine nucleobase
  modified_base order(9,11,13,18,20,22,24): mod_base = OTHER; note = 2-Prime-Fluoro modified nucleoside
  modified_base order(6..8,10,12,17,21,23,25..28): mod_base = OTHER; note = 2-Prime-O-Methyl modified nucleoside
  modified_base order(1^2,27^28): mod_base = OTHER; note = (1,3-dimethylimidazolidin-2-ylidene) Phosphoramidate linkage
  modified_base order(6..14,15^16,18..27): mod_base = OTHER; note = Phosphorothioate linkage
  modified_base 16^17: mod_base = OTHER; note = Methylphosphonate linkage
  misc_feature 1..28: note = T4-10
ttttgttttatcctnnggagtcttgaat

SEQ ID NO: 105 - DNA, 28 bp, synthetic construct
  source 1..28: mol_type = other DNA
  misc_feature 15..16: note = DNA
  misc_feature order(1..14,17..28): note = RNA
  modified_base order(5,19): mod_base = OTHER; note = 2-Prime-O-Methoxyethyl modified nucleoside
  modified_base order(1..4,14): mod_base = OTHER; note = 2-Prime-O-Methoxyethyl modified 5-methyl Uridine
  modified_base 15: mod_base = OTHER; note = DNA nucleotide carrying a 6-amino-5-nitro-3-yl-2(1H)-pyridone nucleobase
  modified_base 16: mod_base = OTHER; note = DNA nucleotide carrying a hypoxanthine nucleobase
  modified_base order(8..13,18,20..25): mod_base = OTHER; note = 2-Prime-Fluoro modified nucleoside
  modified_base order(6..7,17,26..28): mod_base = OTHER; note = 2-Prime-O-Methyl modified nucleoside
  modified_base order(1^2,27^28): mod_base = OTHER; note = (1,3-dimethylimidazolidin-2-ylidene) Phosphoramidate linkage
  modified_base order(6..16,17..27): mod_base = OTHER; note = Phosphorothioate linkage
  modified_base 16^17: mod_base = OTHER; note = Methylphosphonate linkage
  misc_feature 1..28: note = T4-11
ttttgttttatcctnnggagtcttgaat

SEQ ID NO: 106 - DNA, 28 bp, synthetic construct
  source 1..28: mol_type = other DNA
  misc_feature 15..16: note = DNA
  misc_feature order(1..14,17..28): note = RNA
  modified_base order(5,19): mod_base = OTHER; note = 2-Prime-O-Methoxyethyl modified nucleoside
  modified_base order(1..4,14): mod_base = OTHER; note = 2-Prime-O-Methoxyethyl modified 5-methyl Uridine
  modified_base 15: mod_base = OTHER; note = DNA nucleotide carrying a 6-amino-5-nitro-3-yl-2(1H)-pyridone nucleobase
  modified_base 16: mod_base = OTHER; note = DNA nucleotide carrying a hypoxanthine nucleobase
  modified_base order(9,11,13,18,20,22,24): mod_base = OTHER; note = 2-Prime-Fluoro modified nucleoside
  modified_base order(6..8,10,12,17,21,23,25..28): mod_base = OTHER; note = 2-Prime-O-Methyl modified nucleoside
  modified_base order(1^2,27^28): mod_base = OTHER; note = (1,3-dimethylimidazolidin-2-ylidene) Phosphoramidate linkage
  modified_base order(6..16,17..27): mod_base = OTHER; note = Phosphorothioate linkage
  modified_base 16^17: mod_base = OTHER; note = Methylphosphonate linkage
  misc_feature 1..28: note = T4-12
ttttgttttatcctnnggagtcttgaat

SEQ ID NO: 107 - DNA, 26 bp, synthetic construct
  source 1..26: mol_type = other DNA
  misc_feature 13..14: note = DNA
  misc_feature order(1..12,15..26): note = RNA
  modified_base order(3,17): mod_base = OTHER; note = 2-Prime-O-Methoxyethyl modified nucleoside
  modified_base order(1..2,12): mod_base = OTHER; note = 2-Prime-O-Methoxyethyl modified 5-methyl Uridine
  modified_base 13: mod_base = OTHER; note = DNA nucleotide carrying a 6-amino-5-nitro-3-yl-2(1H)-pyridone nucleobase
  modified_base 14: mod_base = OTHER; note = DNA nucleotide carrying a hypoxanthine nucleobase
  modified_base order(6..11,16,18..23): mod_base = OTHER; note = 2-Prime-Fluoro modified nucleoside
  modified_base order(4..5,15,24..26): mod_base = OTHER; note = 2-Prime-O-Methyl modified nucleoside
  modified_base order(1^2,25^26): mod_base = OTHER; note = (1,3-dimethylimidazolidin-2-ylidene) Phosphoramidate linkage
  modified_base order(4..12,13^14,16..25): mod_base = OTHER; note = Phosphorothioate linkage
  modified_base 14^15: mod_base = OTHER; note = Methylphosphonate linkage
  misc_feature 1..26: note = T4-13
ttgttttatcctnnggagtcttgaat

SEQ ID NO: 108 - DNA, 26 bp, synthetic construct
  source 1..26: mol_type = other DNA
  misc_feature 13..14: note = DNA
  misc_feature order(1..12,15..26): note = RNA
  modified_base order(3,17): mod_base = OTHER; note = 2-Prime-O-Methoxyethyl modified nucleoside
  modified_base order(1..2,12): mod_base = OTHER; note = 2-Prime-O-Methoxyethyl modified 5-methyl Uridine
  modified_base 13: mod_base = OTHER; note = DNA nucleotide carrying a 6-amino-5-nitro-3-yl-2(1H)-pyridone nucleobase
  modified_base 14: mod_base = OTHER; note = DNA nucleotide carrying a hypoxanthine nucleobase
  modified_base order(7,9,11,16,18,20,22): mod_base = OTHER; note = 2-Prime-Fluoro modified nucleoside
  modified_base order(4..6,8,10,15,19,21,23..26): mod_base = OTHER; note = 2-Prime-O-Methyl modified nucleoside
  modified_base order(1^2,25^26): mod_base = OTHER; note = (1,3-dimethylimidazolidin-2-ylidene) Phosphoramidate linkage
  modified_base order(4..12,13^14,16..25): mod_base = OTHER; note = Phosphorothioate linkage
  modified_base 14^15: mod_base = OTHER; note = Methylphosphonate linkage
  misc_feature 1..26: note = T4-14
ttgttttatcctnnggagtcttgaat

SEQ ID NO: 109 - DNA, 26 bp, synthetic construct
  source 1..26: mol_type = other DNA
  misc_feature 13..14: note = DNA
  misc_feature order(1..12,15..26): note = RNA
  modified_base order(3,17): mod_base = OTHER; note = 2-Prime-O-Methoxyethyl modified nucleoside
  modified_base order(1..2,12): mod_base = OTHER; note = 2-Prime-O-Methoxyethyl modified 5-methyl Uridine
  modified_base 13: mod_base = OTHER; note = DNA nucleotide carrying a 6-amino-5-nitro-3-yl-2(1H)-pyridone nucleobase
  modified_base 14: mod_base = OTHER; note = DNA nucleotide carrying a hypoxanthine nucleobase
  modified_base order(6..11,16,18..23): mod_base = OTHER; note = 2-Prime-Fluoro modified nucleoside
  modified_base order(4..5,15,24..26): mod_base = OTHER; note = 2-Prime-O-Methyl modified nucleoside
  modified_base order(1^2,25^26): mod_base = OTHER; note = (1,3-dimethylimidazolidin-2-ylidene) Phosphoramidate linkage
  modified_base order(4..14,15..25): mod_base = OTHER; note = Phosphorothioate linkage
  modified_base 14^15: mod_base = OTHER; note = Methylphosphonate linkage
  misc_feature 1..26: note = T4-15
ttgttttatcctnnggagtcttgaat

SEQ ID NO: 110 - DNA, 26 bp, synthetic construct
  source 1..26: mol_type = other DNA
  misc_feature 13..14: note = DNA
  misc_feature order(1..12,15..26): note = RNA
  modified_base order(3,17): mod_base = OTHER; note = 2-Prime-O-Methoxyethyl modified nucleoside
  modified_base order(1..2,12): mod_base = OTHER; note = 2-Prime-O-Methoxyethyl modified 5-methyl Uridine
  modified_base 13: mod_base = OTHER; note = DNA nucleotide carrying a 6-amino-5-nitro-3-yl-2(1H)-pyridone nucleobase
  modified_base 14: mod_base = OTHER; note = DNA nucleotide carrying a hypoxanthine nucleobase
  modified_base order(7,9,11,16,18,20,22): mod_base = OTHER; note = 2-Prime-Fluoro modified nucleoside
  modified_base order(4..6,8,10,15,19,21,23..26): mod_base = OTHER; note = 2-Prime-O-Methyl modified nucleoside
  modified_base order(1^2,25^26): mod_base = OTHER; note = (1,3-dimethylimidazolidin-2-ylidene) Phosphoramidate linkage
  modified_base order(4..14,15..25): mod_base = OTHER; note = Phosphorothioate linkage
  modified_base 14^15: mod_base = OTHER; note = Methylphosphonate linkage
  misc_feature 1..26: note = T4-16
ttgttttatcctnnggagtcttgaat

SEQ ID NO: 111 - DNA, 30 bp, synthetic construct
  source 1..30: mol_type = other DNA
  misc_feature 19..20: note = DNA
  misc_feature order(1..18,21..30): note = RNA
  modified_base order(3,23): mod_base = OTHER; note = 2-Prime-O-Methoxyethyl modified nucleoside
  modified_base 2: mod_base = OTHER; note = 2-Prime-O-Methoxyethyl modified 5-methyl Cytidine
  modified_base order(1,4..5,18): mod_base = OTHER; note = 2-Prime-O-Methoxyethyl modified 5-methyl Uridine
  modified_base 19: mod_base = OTHER; note = DNA nucleotide carrying a 6-amino-5-nitro-3-yl-2(1H)-pyridone nucleobase
  modified_base 20: mod_base = OTHER; note = DNA nucleotide carrying a hypoxanthine nucleobase
  modified_base order(12..17,22,24..29): mod_base = OTHER; note = 2-Prime-Fluoro modified nucleoside
  modified_base order(6..11,21,30): mod_base = OTHER; note = 2-Prime-O-Methyl modified nucleoside
  modified_base order(1^2,29^30): mod_base = OTHER; note = (1,3-dimethylimidazolidin-2-ylidene) Phosphoramidate linkage
  modified_base order(6..18,19^20,22..29): mod_base = OTHER; note = Phosphorothioate linkage
  modified_base 20^21: mod_base = OTHER; note = Methylphosphonate linkage
  misc_feature 1..30: note = T4-17
tcatttttgttttatcctnnggagtcttga

SEQ ID NO: 112 - DNA, 30 bp, synthetic construct; identical to SEQ ID NO: 111
  source 1..30: mol_type = other DNA
  misc_feature 19..20: note = DNA
  misc_feature order(1..18,21..30): note = RNA
  modified_base order(3,23): mod_base = OTHER; note = 2-Prime-O-Methoxyethyl modified nucleoside
  modified_base 2: mod_base = OTHER; note = 2-Prime-O-Methoxyethyl modified 5-methyl Cytidine
  modified_base order(1,4..5,18): mod_base = OTHER; note = 2-Prime-O-Methoxyethyl modified 5-methyl Uridine
  modified_base 19: mod_base = OTHER; note = DNA nucleotide carrying a 6-amino-5-nitro-3-yl-2(1H)-pyridone nucleobase
  modified_base 20: mod_base = OTHER; note = DNA nucleotide carrying a hypoxanthine nucleobase
  modified_base order(13,15,17,22,24,26,28): mod_base = OTHER; note = 2-Prime-Fluoro modified nucleoside
  modified_base order(6..12,14,16,21,25,27,29..30): mod_base = OTHER; note = 2-Prime-O-Methyl modified nucleoside
  modified_base order(1^2,29^30): mod_base = OTHER; note = (1,3-dimethylimidazolidin-2-ylidene) Phosphoramidate linkage
  modified_base order(6..18,19^20,22..29): mod_base = OTHER; note = Phosphorothioate linkage
  modified_base 20^21: mod_base = OTHER; note = Methylphosphonate linkage
  misc_feature 1..30: note = T4-18

SEQ ID NO: 113 - DNA, 30 bp, synthetic construct; identical to SEQ ID NO: 111
  source 1..30: mol_type = other DNA
  misc_feature 19..20: note = DNA
  misc_feature order(1..18,21..30): note = RNA
  modified_base order(3,23): mod_base = OTHER; note = 2-Prime-O-Methoxyethyl modified nucleoside
  modified_base 2: mod_base = OTHER; note = 2-Prime-O-Methoxyethyl modified 5-methyl Cytidine
  modified_base order(1,4..5,18): mod_base = OTHER; note = 2-Prime-O-Methoxyethyl modified 5-methyl Uridine
  modified_base 19: mod_base = OTHER; note = DNA nucleotide carrying a 6-amino-5-nitro-3-yl-2(1H)-pyridone nucleobase
  modified_base 20: mod_base = OTHER; note = DNA nucleotide carrying a hypoxanthine nucleobase
  modified_base order(12..17,22,24..29): mod_base = OTHER; note = 2-Prime-Fluoro modified nucleoside
  modified_base order(6..11,21,30): mod_base = OTHER; note = 2-Prime-O-Methyl modified nucleoside
  modified_base order(1^2,29^30): mod_base = OTHER; note = (1,3-dimethylimidazolidin-2-ylidene) Phosphoramidate linkage
  modified_base order(6..20,21..29): mod_base = OTHER; note = Phosphorothioate linkage
  modified_base 20^21: mod_base = OTHER; note = Methylphosphonate linkage
  misc_feature 1..30: note = T4-19

SEQ ID NO: 114 - DNA, 30 bp, synthetic construct; identical to SEQ ID NO: 111
  source 1..30: mol_type = other DNA
  misc_feature 19..20: note = DNA
  misc_feature order(1..18,21..30): note = RNA
  modified_base order(3,23): mod_base = OTHER; note = 2-Prime-O-Methoxyethyl modified nucleoside
  modified_base 2: mod_base = OTHER; note = 2-Prime-O-Methoxyethyl modified 5-methyl Cytidine
  modified_base order(1,4..5,18): mod_base = OTHER; note = 2-Prime-O-Methoxyethyl modified 5-methyl Uridine
  modified_base 19: mod_base = OTHER; note = DNA nucleotide carrying a 6-amino-5-nitro-3-yl-2(1H)-pyridone nucleobase
  modified_base 20: mod_base = OTHER; note = DNA nucleotide carrying a hypoxanthine nucleobase
  modified_base order(13,15,17,22,24,26,28): mod_base = OTHER; note = 2-Prime-Fluoro modified nucleoside
  modified_base order(6..12,14,16,21,25,27,29..30): mod_base = OTHER; note = 2-Prime-O-Methyl modified nucleoside
  modified_base order(1^2,29^30): mod_base = OTHER; note = (1,3-dimethylimidazolidin-2-ylidene) Phosphoramidate linkage
  modified_base order(6..20,21..29): mod_base = OTHER; note = Phosphorothioate linkage
  modified_base 20^21: mod_base = OTHER; note = Methylphosphonate linkage
  misc_feature 1..30: note = T4-20

SEQ ID NO: 115 - DNA, 28 bp, synthetic construct
  source 1..28: mol_type = other DNA
  misc_feature 19..20: note = DNA
  misc_feature order(1..18,21..28): note = RNA
  modified_base order(3,23): mod_base = OTHER; note = 2-Prime-O-Methoxyethyl modified nucleoside
  modified_base 2: mod_base = OTHER; note = 2-Prime-O-Methoxyethyl modified 5-methyl Cytidine
  modified_base order(1,4..5,18): mod_base = OTHER; note = 2-Prime-O-Methoxyethyl modified 5-methyl Uridine
  modified_base 19: mod_base = OTHER; note = DNA nucleotide carrying a 6-amino-5-nitro-3-yl-2(1H)-pyridone nucleobase
  modified_base 20: mod_base = OTHER; note = DNA nucleotide carrying a hypoxanthine nucleobase
  modified_base order(12..17,22,24..28): mod_base = OTHER; note = 2-Prime-Fluoro modified nucleoside
  modified_base order(6..11,21): mod_base = OTHER; note = 2-Prime-O-Methyl modified nucleoside
  modified_base order(1^2,27^28): mod_base = OTHER; note = (1,3-dimethylimidazolidin-2-ylidene) Phosphoramidate linkage
  modified_base order(6..18,19^20,22..27): mod_base = OTHER; note = Phosphorothioate linkage
  modified_base 20^21: mod_base = OTHER; note = Methylphosphonate linkage
  misc_feature 1..28: note = T4-21
tcatttttgttttatcctnnggagtctt

SEQ ID NO: 116 - DNA, 28 bp, synthetic construct
  source 1..28: mol_type = other DNA
  misc_feature 19..20: note = DNA
  misc_feature order(1..18,21..28): note = RNA
  modified_base order(3,23): mod_base = OTHER; note = 2-Prime-O-Methoxyethyl modified nucleoside
  modified_base 2: mod_base = OTHER; note = 2-Prime-O-Methoxyethyl modified 5-methyl Cytidine
  modified_base order(1,4..5,18): mod_base = OTHER; note = 2-Prime-O-Methoxyethyl modified 5-methyl Uridine
  modified_base 19: mod_base = OTHER; note = DNA nucleotide carrying a 6-amino-5-nitro-3-yl-2(1H)-pyridone nucleobase
  modified_base 20: mod_base = OTHER; note = DNA nucleotide carrying a hypoxanthine nucleobase
  modified_base order(13,15,17,22,24,26,28): mod_base = OTHER; note = 2-Prime-Fluoro modified nucleoside
  modified_base order(6..12,14,16,21,25,27): mod_base = OTHER; note = 2-Prime-O-Methyl modified nucleoside
  modified_base order(1^2,27^28): mod_base = OTHER; note = (1,3-dimethylimidazolidin-2-ylidene) Phosphoramidate linkage
  modified_base order(6..18,19^20,22..27): mod_base = OTHER; note = Phosphorothioate linkage
  modified_base 20^21: mod_base = OTHER; note = Methylphosphonate linkage
  misc_feature 1..28: note = T4-22
tcatttttgttttatcctnnggagtctt

SEQ ID NO: 117 - DNA, 28 bp, synthetic construct
  source 1..28: mol_type = other DNA
  misc_feature 19..20: note = DNA
  misc_feature order(1..18,21..28): note = RNA
  modified_base order(3,23): mod_base = OTHER; note = 2-Prime-O-Methoxyethyl modified nucleoside
  modified_base 2: mod_base = OTHER; note = 2-Prime-O-Methoxyethyl modified 5-methyl Cytidine
  modified_base order(1,4..5,18): mod_base = OTHER; note = 2-Prime-O-Methoxyethyl modified 5-methyl Uridine
  modified_base 19: mod_base = OTHER; note = DNA nucleotide carrying a 6-amino-5-nitro-3-yl-2(1H)-pyridone nucleobase
  modified_base 20: mod_base = OTHER; note = DNA nucleotide carrying a hypoxanthine nucleobase
  modified_base order(12..17,22,24..28): mod_base = OTHER; note = 2-Prime-Fluoro modified nucleoside
  modified_base order(6..11,21): mod_base = OTHER; note = 2-Prime-O-Methyl modified nucleoside
  modified_base order(1^2,27^28): mod_base = OTHER; note = (1,3-dimethylimidazolidin-2-ylidene) Phosphoramidate linkage
  modified_base order(6..20,21..27): mod_base = OTHER; note = Phosphorothioate linkage
  modified_base 20^21: mod_base = OTHER; note = Methylphosphonate linkage
  misc_feature 1..28: note = T4-23
tcatttttgttttatcctnnggagtctt

SEQ ID NO: 118 - DNA, 28 bp, synthetic construct
  source 1..28: mol_type = other DNA
  misc_feature 19..20: note = DNA
  misc_feature order(1..18,21..28): note = RNA
  modified_base order(3,23): mod_base = OTHER; note = 2-Prime-O-Methoxyethyl modified nucleoside
  modified_base 2: mod_base = OTHER; note = 2-Prime-O-Methoxyethyl modified 5-methyl Cytidine
  modified_base order(1,4..5,18): mod_base = OTHER; note = 2-Prime-O-Methoxyethyl modified 5-methyl Uridine
  modified_base 19: mod_base = OTHER; note = DNA nucleotide carrying a 6-amino-5-nitro-3-yl-2(1H)-pyridone nucleobase
  modified_base 20: mod_base = OTHER; note = DNA nucleotide carrying a hypoxanthine nucleobase
  modified_base order(13,15,17,22,24,26,28): mod_base = OTHER; note = 2-Prime-Fluoro modified nucleoside
  modified_base order(6..12,14,16,21,25,27): mod_base = OTHER; note = 2-Prime-O-Methyl modified nucleoside
  modified_base order(1^2,27^28): mod_base = OTHER; note = (1,3-dimethylimidazolidin-2-ylidene) Phosphoramidate linkage
  modified_base order(6..20,21..27): mod_base = OTHER; note = Phosphorothioate linkage
  modified_base 20^21: mod_base = OTHER; note = Methylphosphonate linkage
  misc_feature 1..28: note = T4-24
tcatttttgttttatcctnnggagtctt

SEQ ID NO: 119 - DNA, 30 bp, synthetic construct
  source 1..30: mol_type = other DNA
  misc_feature 24..25: note = DNA
  misc_feature order(1..23,26..30): note = RNA
  modified_base 28: mod_base = OTHER; note = 2-Prime-O-Methoxyethyl modified nucleoside
  modified_base 23: mod_base = OTHER; note = 2-Prime-O-Methoxyethyl modified 5-methyl Uridine
  modified_base 24: mod_base = OTHER; note = DNA nucleotide carrying a 6-amino-5-nitro-3-yl-2(1H)-pyridone nucleobase
  modified_base 25: mod_base = OTHER; note = DNA nucleotide carrying a hypoxanthine nucleobase
  modified_base order(5..6,9..10,13..14,17..22,27): mod_base = OTHER; note = 2-Prime-Fluoro modified nucleoside
  modified_base order(1..4,7..8,11..12,15..16,26,29..30): mod_base = OTHER; note = 2-Prime-O-Methyl modified nucleoside
  modified_base order(1^2,29^30): mod_base = OTHER; note = (1,3-dimethylimidazolidin-2-ylidene) Phosphoramidate linkage
  modified_base order(2..23,24^25,27..29): mod_base = OTHER; note = Phosphorothioate linkage
  modified_base 25^26: mod_base = OTHER; note = Methylphosphonate linkage
  misc_feature 1..30: note = T4-25
gtagatcatttttgttttatcctnnggagt

SEQ ID NO: 120 - DNA, 30 bp, synthetic construct; identical to SEQ ID NO: 119
  source 1..30: mol_type = other DNA
  misc_feature 24..25: note = DNA
  misc_feature order(1..23,26..30): note = RNA
  modified_base 28: mod_base = OTHER; note = 2-Prime-O-Methoxyethyl modified nucleoside
  modified_base 23: mod_base = OTHER; note = 2-Prime-O-Methoxyethyl modified 5-methyl Uridine
  modified_base 24: mod_base = OTHER; note = DNA nucleotide carrying a 6-amino-5-nitro-3-yl-2(1H)-pyridone nucleobase
  modified_base 25: mod_base = OTHER; note = DNA nucleotide carrying a hypoxanthine nucleobase
  modified_base order(4..5,8..9,11..15,18..19,22,27): mod_base = OTHER; note = 2-Prime-Fluoro modified nucleoside
  modified_base order(1..3,6..7,10,16..17,20..21,26,29..30): mod_base = OTHER; note = 2-Prime-O-Methyl modified nucleoside
  modified_base order(1^2,11^12,14^15,29^30): mod_base = OTHER; note = (1,3-dimethylimidazolidin-2-ylidene) Phosphoramidate linkage
  modified_base order(2..6,8..11,12^13,18..20,21..23,24^25,27..29): mod_base = OTHER; note = Phosphorothioate linkage
  modified_base 25^26: mod_base = OTHER; note = Methylphosphonate linkage
  misc_feature 1..30: note = T4-26

SEQ ID NO: 121 - DNA, 30 bp, synthetic construct
  source 1..30: mol_type = other DNA
  misc_feature 24..25: note = DNA
  misc_feature order(1..23,26..30): note = RNA
  modified_base 28: mod_base = OTHER; note = 2-Prime-O-Methoxyethyl modified nucleoside
  modified_base 23: mod_base = OTHER; note = 2-Prime-O-Methoxyethyl modified 5-methyl Uridine
  modified_base 24: mod_base = OTHER; note = DNA nucleotide carrying a 6-amino-5-nitro-3-yl-2(1H)-pyridone nucleobase
  modified_base 25: mod_base = OTHER; note = DNA nucleotide carrying a hypoxanthine nucleobase
  modified_base order(4..6,8..9,11,13..15,18..20,22,27): mod_base = OTHER; note = 2-Prime-Fluoro modified nucleoside
  modified_base order(1..3,7,10,12,16..17,21,26,29..30): mod_base = OTHER; note = 2-Prime-O-Methyl modified nucleoside
  modified_base order(1^2,11^12,14^15,29^30): mod_base = OTHER; note = (1,3-dimethylimidazolidin-2-ylidene) Phosphoramidate linkage
  modified_base order(2..6,7..9,10^11,13^14,16..21,22^23,24^25,27..29): mod_base = OTHER; note = Phosphorothioate linkage
  modified_base 25^26: mod_base = OTHER; note = Methylphosphonate linkage
  misc_feature 1..30: note = T4-27
gtagatcatttttgttttatcttnnggagt

SEQ ID NO: 122 - DNA, 30 bp, synthetic construct; identical to SEQ ID NO: 121
  source 1..30: mol_type = other DNA
  misc_feature 24..25: note = DNA
  misc_feature order(1..23,26..30): note = RNA
  modified_base 28: mod_base = OTHER; note = 2-Prime-O-Methoxyethyl modified nucleoside
  modified_base order(7,21): mod_base = OTHER; note = 2-Prime-O-Methoxyethyl modified 5-methyl Cytidine
  modified_base order(6,16,23): mod_base = OTHER; note = 2-Prime-O-Methoxyethyl modified 5-methyl Uridine
  modified_base 24: mod_base = OTHER; note = DNA nucleotide carrying a 6-amino-5-nitro-3-yl-2(1H)-pyridone nucleobase
  modified_base 25: mod_base = OTHER; note = DNA nucleotide carrying a hypoxanthine nucleobase
  modified_base order(4..5,8..9,13..15,17,19,22,27): mod_base = OTHER; note = 2-Prime-Fluoro modified nucleoside
  modified_base order(1..3,10..12,18,20,26,29..30): mod_base = OTHER; note = 2-Prime-O-Methyl modified nucleoside
  modified_base order(1^2,11^12,14^15,19^20,29^30): mod_base = OTHER; note = (1,3-dimethylimidazolidin-2-ylidene) Phosphoramidate linkage
  modified_base order(2..6,8..10,13^14,16..18,22^23,24^25,27..29): mod_base = OTHER; note = Phosphorothioate linkage
  modified_base 25^26: mod_base = OTHER; note = Methylphosphonate linkage
  misc_feature 1..30: note = T4-28

SEQ ID NO: 123 - DNA, 30 bp, synthetic construct; identical to SEQ ID NO: 121
  source 1..30: mol_type = other DNA
  misc_feature 24..25: note = DNA
  misc_feature order(1..23,26..30): note = RNA
  modified_base 28: mod_base = OTHER; note = 2-Prime-O-Methoxyethyl modified nucleoside
  modified_base order(7,21): mod_base = OTHER; note = 2-Prime-O-Methoxyethyl modified 5-methyl Cytidine
  modified_base order(6,10,16,20,23): mod_base = OTHER; note = 2-Prime-O-Methoxyethyl modified 5-methyl Uridine
  modified_base 24: mod_base = OTHER; note = DNA nucleotide carrying a 6-amino-5-nitro-3-yl-2(1H)-pyridone nucleobase
  modified_base 25: mod_base = OTHER; note = DNA nucleotide carrying a hypoxanthine nucleobase
  modified_base order(4..5,8..9,11,13..15,17..19,22,27): mod_base = OTHER; note = 2-Prime-Fluoro modified nucleoside
  modified_base order(1..3,12,26,29..30): mod_base = OTHER; note = 2-Prime-O-Methyl modified nucleoside
  modified_base order(1^2,11^12,14^15,19^20,29^30): mod_base = OTHER; note = (1,3-dimethylimidazolidin-2-ylidene) Phosphoramidate linkage
  modified_base order(2..6,8..10,13^14,16..19,22^23,24^25,27..29): mod_base = OTHER; note = Phosphorothioate linkage
  modified_base 25^26: mod_base = OTHER; note = Methylphosphonate linkage
  misc_feature 1..30: note = T4-29

SEQ ID NO: 124 - DNA, 27 bp, synthetic construct
  source 1..27: mol_type = other DNA
  misc_feature 16..17: note = DNA
  misc_feature order(1..15,18..27): note = RNA
  modified_base 20: mod_base = OTHER; note = 2-Prime-O-Methoxyethyl modified nucleoside
  modified_base 13: mod_base = OTHER; note = 2-Prime-O-Methoxyethyl modified 5-methyl Cytidine
  modified_base order(1..2,4,8..9,12,15): mod_base = OTHER; note = 2-Prime-O-Methoxyethyl modified 5-methyl Uridine
  modified_base 16: mod_base = OTHER; note = DNA nucleotide carrying a 6-amino-5-nitro-3-yl-2(1H)-pyridone nucleobase
  modified_base 17: mod_base = OTHER; note = DNA nucleotide carrying a hypoxanthine nucleobase
  modified_base order(5..6,14,19,21,23,25): mod_base = OTHER; note = 2-Prime-Fluoro modified nucleoside
  modified_base order(3,7,10..11,18,22,24,26..27): mod_base = OTHER; note = 2-Prime-O-Methyl modified nucleoside
  modified_base order(2^3,5^6,9..12,14..17,18..26): mod_base = OTHER; note = Phosphorothioate linkage
  modified_base order(3^4,6^7,26^27): mod_base = OTHER; note = (1,3-dimethylimidazolidin-2-ylidene) Phosphoramidate linkage
  modified_base 17^18: mod_base = OTHER; note = Methylphosphonate linkage
  misc_feature 1..27: note = T4-30
tttttgttttatcttnnggagtcttga

SEQ ID NO: 125 - DNA, 22 bp, synthetic construct
  source 1..22: mol_type = other DNA
  misc_feature 1..22: note = Primer
gttcagcaagatcaaggctcac

SEQ ID NO: 126 - DNA, 23 bp, synthetic construct
  source 1..23: mol_type = other DNA
  modified_base order(5,10..12): mod_base = OTHER; note = Locked Nucleic Acid
  misc_feature 1..23: note = Probe
ctggtggcacggtatggcatcat

SEQ ID NO: 127 - DNA, 23 bp, synthetic construct
  source 1..23: mol_type = other DNA
  modified_base order(5,10..12,20): mod_base = OTHER; note = Locked Nucleic Acid
  misc_feature 1..23: note = Probe
ctggtggcacagtatggcatcat

SEQ ID NO: 128 - DNA, 23 bp, synthetic construct
  source 1..23: mol_type = other DNA
  modified_base order(5,10..12,20): mod_base = OTHER; note = Locked Nucleic Acid
  misc_feature 1..23: note = Probe
ctggtggcacagtatggcatcat

SEQ ID NO: 129 - DNA, 21 bp, synthetic construct
  source 1..21: mol_type = other DNA
  misc_feature 1..21: note = Primer
tggagcaggtggtcatcacaa

SEQ ID NO: 130 - DNA, 22 bp, synthetic construct
  source 1..22: mol_type = other DNA
  misc_feature 1..22: note = Primer
tgacaccactcttgattgccac

SEQ ID NO: 131 - DNA, 24 bp, synthetic construct
  source 1..24: mol_type = other DNA
  modified_base order(4,9..11): mod_base = OTHER; note = Locked Nucleic Acid
  misc_feature 1..24: note = Probe
tggacatttcggcatccagtctcc

SEQ ID NO: 132 - DNA, 24 bp, synthetic construct
  source 1..24: mol_type = other DNA
  modified_base order(4,9..11,22): mod_base = OTHER; note = Locked Nucleic Acid
  misc_feature 1..24: note = Probe
tggacattttggcatccagtctcc

SEQ ID NO: 133 - DNA, 24 bp, synthetic construct
  source 1..24: mol_type = other DNA
  modified_base order(4,9..11,22): mod_base = OTHER; note = Locked Nucleic Acid
  misc_feature 1..24: note = Probe
tggacattttggcatccagtctcc

SEQ ID NO: 134 - DNA, 23 bp, synthetic construct
  source 1..23: mol_type = other DNA
  modified_base 5..7: mod_base = OTHER; note = Locked Nucleic Acid
  misc_feature 1..23: note = Probe
cagtccccatgctgacagtgcgt

SEQ ID NO: 135 - DNA, 23 bp, synthetic construct
  source 1..23: mol_type = other DNA
  modified_base order(5..7,19): mod_base = OTHER; note = Locked Nucleic Acid
  misc_feature 1..23: note = Probe
cagtctccatgctgacagtgcgt

SEQ ID NO: 136 - DNA, 23 bp, synthetic construct
  source 1..23: mol_type = other DNA
  modified_base order(5..7,19): mod_base = OTHER; note = Locked Nucleic Acid
  misc_feature 1..23: note = Probe
cagtctccatgctgacagtgcgt

SEQ ID NO: 137 - DNA, 22 bp, synthetic construct
  source 1..22: mol_type = other DNA
  misc_feature 1..22: note = Primer
gaaaggccacattgaggatggt

SEQ ID NO: 138 - DNA, 21 bp, synthetic construct
  source 1..21: mol_type = other DNA
  misc_feature 1..21: note = Primer
ctcaatgtggcctttccacct

SEQ ID NO: 139 - DNA, 24 bp, synthetic construct
  source 1..24: mol_type = other DNA
  modified_base order(3,10..13,23): mod_base = OTHER; note = Locked Nucleic Acid
  misc_feature 1..24: note = Probe
tgttttatcctcgggagtcttgaa

SEQ ID NO: 140 - DNA, 24 bp, synthetic construct
  source 1..24: mol_type = other DNA
  modified_base order(3,10..13,18,23): mod_base = OTHER; note = Locked Nucleic Acid
  misc_feature 1..24: note = Probe
tgttttatccttgggagtcttgaa

SEQ ID NO: 141 - DNA, 24 bp, synthetic construct
  source 1..24: mol_type = other DNA
  modified_base order(3,10..13,18,23): mod_base = OTHER; note = Locked Nucleic Acid
  misc_feature 1..24: note = Probe
tgttttatccttgggagtcttgaa

SEQ ID NO: 142 - DNA, 22 bp, synthetic construct
  source 1..22: mol_type = other DNA
  misc_feature 1..22: note = Primer
cttcagttgtggcagctgtgta

SEQ ID NO: 143 - DNA, 20 bp, synthetic construct
  source 1..20: mol_type = other DNA
  misc_feature 1..20: note = Primer
ggagggaacctgtccaatgt

SEQ ID NO: 144 - DNA, 24 bp, synthetic construct
  source 1..24: mol_type = other DNA
  modified_base 6: mod_base = OTHER; note = Locked Nucleic Acid
  misc_feature 1..24: note = Probe
ctcagcattgtgatgaccacctgc

SEQ ID NO: 145 - DNA, 24 bp, synthetic construct
  source 1..24: mol_type = other DNA
  modified_base 6: mod_base = OTHER; note = Locked Nucleic Acid
  misc_feature 1..24: note = Probe
ctcagcattgtgatgaccacctgc

SEQ ID NO: 146 - DNA, 20 bp, synthetic construct
  source 1..20: mol_type = other DNA
  misc_feature 1..20: note = Primer
cttgtccttcaggtccccat

SEQ ID NO: 147 - DNA, 20 bp, synthetic construct
  source 1..20: mol_type = other DNA
  misc_feature 1..20: note = Primer
attgccacctcctccctgat

SEQ ID NO: 148 - DNA, 25 bp, synthetic construct
  source 1..25: mol_type = other DNA
  modified_base order(2,6,10,16,20,24): mod_base = OTHER; note = Locked Nucleic Acid
  misc_feature 1..25: note = Probe
ctgcctcaatggacgataaaacaaa

SEQ ID NO: 149 - DNA, 20 bp, synthetic construct
  source 1..20: mol_type = other DNA
  misc_feature 1..20: note = Primer
gtcctcccctttgtaggtgc

SEQ ID NO: 150 - DNA, 38 bp, synthetic construct
  source 1..38: mol_type = other DNA
  misc_feature 25..26: note = DNA
  misc_feature order(1..24,27..38): note = RNA
  modified_base order(6..11,13): mod_base = OTHER; note = 2-Prime-O-Methoxyethyl modified nucleoside
  modified_base order(12,24,29): mod_base = OTHER; note = 2-Prime-O-Methoxyethyl modified 5-methyl Cytidine
  modified_base order(5,14): mod_base = OTHER; note = 2-Prime-O-Methoxyethyl modified 5-methyl Uridine
  modified_base 25: mod_base = OTHER; note = DNA nucleotide carrying a 6-amino-5-nitro-3-yl-2(1H)-pyridone nucleobase
  modified_base 26: mod_base = OTHER; note = DNA nucleotide carrying a hypoxanthine nucleobase
  modified_base order(19,21,23,28,30,32,34): mod_base = OTHER; note = 2-Prime-Fluoro modified nucleoside
  modified_base order(1..4,15..18,20,22,27,31,33,35..38): mod_base = OTHER; note = 2-Prime-O-Methyl modified nucleoside
  modified_base order(1..5,15..24,25^26,28..38): mod_base = OTHER; note = Phosphorothioate linkage
  modified_base 26^27: mod_base = OTHER; note = Methylphosphonate linkage
  misc_feature 1..38: note = RM106618
gccgtgaggggcatgatgccatacnntgccaccagggc

SEQ ID NO: 151 - DNA, 35 bp, synthetic construct
  source 1..35: mol_type = other DNA
  misc_feature 22..23: note = DNA
  misc_feature order(1..21,24..35): note = RNA
  modified_base order(3..8,10): mod_base = OTHER; note = 2-Prime-O-Methoxyethyl modified nucleoside
  modified_base order(9,21,26): mod_base = OTHER; note = 2-Prime-O-Methoxyethyl modified 5-methyl Cytidine
  modified_base order(2,11): mod_base = OTHER; note = 2-Prime-O-Methoxyethyl modified 5-methyl Uridine
  modified_base 22: mod_base = OTHER; note = DNA nucleotide carrying a 6-amino-5-nitro-3-yl-2(1H)-pyridone nucleobase
  modified_base 23: mod_base = OTHER; note = DNA nucleotide carrying a hypoxanthine nucleobase
  modified_base order(16,18,20,25,27,29,31): mod_base = OTHER; note = 2-Prime-Fluoro modified nucleoside
  modified_base order(1,12..15,17,19,24,28,30,32..35): mod_base = OTHER; note = 2-Prime-O-Methyl modified nucleoside
  modified_base order(1^2,12..21,22^23,25..35): mod_base = OTHER; note = Phosphorothioate linkage
  modified_base 23^24: mod_base = OTHER; note = Methylphosphonate linkage
  misc_feature 1..35: note = RM106619
gtgaggggcatgatgccatacnntgccaccagggc

SEQ ID NO: 152 - DNA, 32 bp, synthetic construct; identical to SEQ ID NO: 5
  source 1..32: mol_type = other DNA
  misc_feature 19..20: note = DNA
  misc_feature order(1..18,21..32): note = RNA
  modified_base order(1..5,7): mod_base = OTHER; note = 2-Prime-O-Methoxyethyl modified nucleoside
  modified_base order(6,18,23): mod_base = OTHER; note = 2-Prime-O-Methoxyethyl modified 5-methyl Cytidine
  modified_base 8: mod_base = OTHER; note = 2-Prime-O-Methoxyethyl modified 5-methyl Uridine
  modified_base 19: mod_base = OTHER; note = DNA nucleotide carrying a 6-amino-5-nitro-3-yl-2(1H)-pyridone nucleobase
  modified_base 20: mod_base = OTHER; note = DNA nucleotide carrying a hypoxanthine nucleobase
  modified_base order(13,15,17,22,24,26,28): mod_base = OTHER; note = 2-Prime-Fluoro modified nucleoside
  modified_base order(9..12,14,16,21,25,27,29..32): mod_base = OTHER; note = 2-Prime-O-Methyl modified nucleoside
  modified_base order(9..18,19^20,22..32): mod_base = OTHER; note = Phosphorothioate linkage
  modified_base 20^21: mod_base = OTHER; note = Methylphosphonate linkage
  misc_feature 1..32: note = RM106620

SEQ ID NO: 153 - DNA, 29 bp, synthetic construct
  source 1..29: mol_type = other DNA
  misc_feature 16..17: note = DNA
  misc_feature order(1..15,18..29): note = RNA
  modified_base order(1..2,4): mod_base = OTHER; note = 2-Prime-O-Methoxyethyl modified nucleoside
  modified_base order(3,15,20): mod_base = OTHER; note = 2-Prime-O-Methoxyethyl modified 5-methyl Cytidine
  modified_base 5: mod_base = OTHER; note = 2-Prime-O-Methoxyethyl modified 5-methyl Uridine
  modified_base 16: mod_base = OTHER; note = DNA nucleotide carrying a 6-amino-5-nitro-3-yl-2(1H)-pyridone nucleobase
  modified_base 17: mod_base = OTHER; note = DNA nucleotide carrying a hypoxanthine nucleobase
  modified_base order(10,12,14,19,21,23,25): mod_base = OTHER; note = 2-Prime-Fluoro modified nucleoside
  modified_base order(6..9,11,13,18,22,24,26..29): mod_base = OTHER; note = 2-Prime-O-Methyl modified nucleoside
  modified_base order(6..15,16^17,19..29): mod_base = OTHER; note = Phosphorothioate linkage
  modified_base 17^18: mod_base = OTHER; note = Methylphosphonate linkage
  misc_feature 1..29: note = RM106621
ggcatgatgccatacnntgccaccagggc

SEQ ID NO: 154 - DNA, 27 bp, synthetic construct
  source 1..27: mol_type = other DNA
  misc_feature 14..15: note = DNA
  misc_feature order(1..13,16..27): note = RNA
  modified_base 2: mod_base = OTHER; note = 2-Prime-O-Methoxyethyl modified nucleoside
  modified_base order(1,13,18): mod_base = OTHER; note = 2-Prime-O-Methoxyethyl modified 5-methyl Cytidine
  modified_base 3: mod_base = OTHER; note = 2-Prime-O-Methoxyethyl modified 5-methyl Uridine
  modified_base 14: mod_base = OTHER; note = DNA nucleotide carrying a 6-amino-5-nitro-3-yl-2(1H)-pyridone nucleobase
  modified_base 15: mod_base = OTHER; note = DNA nucleotide carrying a hypoxanthine nucleobase
  modified_base order(8,10,12,17,19,21,23): mod_base = OTHER; note = 2-Prime-Fluoro modified nucleoside
  modified_base order(4..7,9,11,16,20,22,24..27): mod_base = OTHER; note = 2-Prime-O-Methyl modified nucleoside
  modified_base order(4..13,14^15,17..27): mod_base = OTHER; note = Phosphorothioate linkage
  modified_base 15^16: mod_base = OTHER; note = Methylphosphonate linkage
  misc_feature 1..27: note = RM106622
catgatgccatacnntgccaccagggc

SEQ ID NO: 155 - DNA, 25 bp, synthetic construct
  source 1..25: mol_type = other DNA
  misc_feature 12..13: note = DNA
  misc_feature order(1..11,14..25): note = RNA
  modified_base order(11,16): mod_base = OTHER; note = 2-Prime-O-Methoxyethyl modified 5-methyl Cytidine
  modified_base 1: mod_base = OTHER; note = 2-Prime-O-Methoxyethyl modified 5-methyl Uridine
  modified_base 12: mod_base = OTHER; note = DNA nucleotide carrying a 6-amino-5-nitro-3-yl-2(1H)-pyridone nucleobase
  modified_base 13: mod_base = OTHER; note = DNA nucleotide carrying a hypoxanthine nucleobase
  modified_base order(6,8,10,15,17,19,21): mod_base = OTHER; note = 2-Prime-Fluoro modified nucleoside
  modified_base order(2..5,7,9,14,18,20,22..25): mod_base = OTHER; note = 2-Prime-O-Methyl modified nucleoside
  modified_base order(2..11,12^13,15..25): mod_base = OTHER; note = Phosphorothioate linkage
  modified_base 13^14: mod_base = OTHER; note = Methylphosphonate linkage
  misc_feature 1..25: note = RM106623
tgatgccatacnntgccaccagggc

SEQ ID NO: 156 - DNA, 23 bp, synthetic construct
  source 1..23: mol_type = other DNA
  misc_feature 10..11: note = DNA
  misc_feature order(1..9,12..23): note = RNA
  modified_base order(9,14): mod_base = OTHER; note = 2-Prime-O-Methoxyethyl modified 5-methyl Cytidine
  modified_base 10: mod_base = OTHER; note = DNA nucleotide carrying a 6-amino-5-nitro-3-yl-2(1H)-pyridone nucleobase
  modified_base 11: mod_base = OTHER; note = DNA nucleotide carrying a hypoxanthine nucleobase
  modified_base order(4,6,8,13,15,17,19): mod_base = OTHER; note = 2-Prime-Fluoro modified nucleoside
  modified_base order(1..3,5,7,12,16,18,20..23): mod_base = OTHER; note = 2-Prime-O-Methyl modified nucleoside
  modified_base order(1..9,10^11,13..23): mod_base = OTHER; note = Phosphorothioate linkage
  modified_base 11^12: mod_base = OTHER; note = Methylphosphonate linkage
  misc_feature 1..23: note = RM106624
atgccatacnntgccaccagggc

SEQ ID NO: 157 - DNA, 21 bp, synthetic construct
  source 1..21: mol_type = other DNA
  misc_feature 8..9: note = DNA
  misc_feature order(1..7,10..21): note = RNA
  modified_base order(7,12): mod_base = OTHER; note = 2-Prime-O-Methoxyethyl modified 5-methyl Cytidine
  modified_base 8: mod_base = OTHER; note = DNA nucleotide carrying a 6-amino-5-nitro-3-yl-2(1H)-pyridone nucleobase
  modified_base 9: mod_base = OTHER; note = DNA nucleotide carrying a hypoxanthine nucleobase
  modified_base order(2,4,6,11,13,15,17): mod_base = OTHER; note = 2-Prime-Fluoro modified nucleoside
  modified_base order(1,3,5,10,14,16,18..21): mod_base = OTHER; note = 2-Prime-O-Methyl modified nucleoside
  modified_base order(1..7,8^9,11..21): mod_base = OTHER; note = Phosphorothioate linkage
  modified_base 9^10: mod_base = OTHER; note = Methylphosphonate linkage
  misc_feature 1..21: note = RM106625
gccatacnntgccaccagggc

SEQ ID NO: 158 - DNA, 27 bp, synthetic construct
  source 1..27: mol_type = other DNA
  misc_feature 14..15: note = DNA
  misc_feature order(1..13,16..27): note = RNA
  modified_base order(13,18): mod_base = OTHER; note = 2-Prime-O-Methoxyethyl modified 5-methyl Cytidine
  modified_base 14: mod_base = OTHER; note = DNA nucleotide carrying a 6-amino-5-nitro-3-yl-2(1H)-pyridone nucleobase
  modified_base 15: mod_base = OTHER; note = DNA nucleotide carrying a hypoxanthine nucleobase
  modified_base order(8,10,12,17,19,21,23): mod_base = OTHER; note = 2-Prime-Fluoro modified nucleoside
  modified_base order(1..7,9,11,16,20,22,24..27): mod_base = OTHER; note = 2-Prime-O-Methyl modified nucleoside
  modified_base order(1..13,14^15,17..27): mod_base = OTHER; note = Phosphorothioate linkage
  modified_base 15^16: mod_base = OTHER; note = Methylphosphonate linkage
  misc_feature 1..27: note = RM106626
catgatgccatacnntgccaccagggc

SEQ ID NO: 159 - DNA, 25 bp, synthetic construct
  source 1..25: mol_type = other DNA
  misc_feature 14..15: note = DNA
  misc_feature order(1..13,16..25): note = RNA
  modified_base 2: mod_base = OTHER; note = 2-Prime-O-Methoxyethyl modified nucleoside
  modified_base order(1,13,18): mod_base = OTHER; note = 2-Prime-O-Methoxyethyl modified 5-methyl Cytidine
  modified_base 3: mod_base = OTHER; note = 2-Prime-O-Methoxyethyl modified 5-methyl Uridine
  modified_base 14: mod_base = OTHER; note = DNA nucleotide carrying a 6-amino-5-nitro-3-yl-2(1H)-pyridone nucleobase
  modified_base 15: mod_base = OTHER; note = DNA nucleotide carrying a hypoxanthine nucleobase
  modified_base order(8,10,12,17,19,21,23): mod_base = OTHER; note = 2-Prime-Fluoro modified nucleoside
  modified_base order(4..7,9,11,16,20,22,24..25): mod_base = OTHER; note = 2-Prime-O-Methyl modified nucleoside
  modified_base order(4..13,14^15,17..25): mod_base = OTHER; note = Phosphorothioate linkage
  modified_base 15^16: mod_base = OTHER; note = Methylphosphonate linkage
  misc_feature 1..25: note = RM106627
catgatgccatacnntgccaccagg

SEQ ID NO: 160 - DNA, 23 bp, synthetic construct
  source 1..23: mol_type = other DNA
  misc_feature 14..15: note = DNA
  misc_feature order(1..13,16..23): note = RNA
  modified_base 2: mod_base = OTHER; note = 2-Prime-O-Methoxyethyl modified nucleoside
  modified_base order(1,13,18): mod_base = OTHER; note = 2-Prime-O-Methoxyethyl modified 5-methyl Cytidine
  modified_base 3: mod_base = OTHER; note = 2-Prime-O-Methoxyethyl modified 5-methyl Uridine
  modified_base 14: mod_base = OTHER; note = DNA nucleotide carrying a 6-amino-5-nitro-3-yl-2(1H)-pyridone nucleobase
  modified_base 15: mod_base = OTHER; note = DNA nucleotide carrying a hypoxanthine nucleobase
  modified_base order(8,10,12,17,19,21,23): mod_base = OTHER; note = 2-Prime-Fluoro modified nucleoside
  modified_base order(4..7,9,11,16,20,22): mod_base = OTHER; note = 2-Prime-O-Methyl modified nucleoside
  modified_base order(4..13,14^15,17..23): mod_base = OTHER; note = Phosphorothioate linkage
  modified_base 15^16: mod_base = OTHER; note = Methylphosphonate linkage
  misc_feature 1..23: note = RM106628
catgatgccatacnntgccacca

SEQ ID NO: 161 - DNA, 21 bp, synthetic construct
  source 1..21: mol_type = other DNA
  misc_feature 14..15: note = DNA
  misc_feature order(1..13,16..21): note = RNA
  modified_base 2: mod_base = OTHER; note = 2-Prime-O-Methoxyethyl modified nucleoside
  modified_base order(1,13,18): mod_base = OTHER; note = 2-Prime-O-Methoxyethyl modified 5-methyl Cytidine
  modified_base 3: mod_base = OTHER; note = 2-Prime-O-Methoxyethyl modified 5-methyl Uridine
  modified_base 14: mod_base = OTHER; note = DNA nucleotide carrying a 6-amino-5-nitro-3-yl-2(1H)-pyridone nucleobase
  modified_base 15: mod_base = OTHER; note = DNA nucleotide carrying a hypoxanthine nucleobase
  modified_base order(8,10,12,17,19,21): mod_base = OTHER; note = 2-Prime-Fluoro modified nucleoside
  modified_base order(4..7,9,11,16,20): mod_base = OTHER; note = 2-Prime-O-Methyl modified nucleoside
  modified_base order(4..13,14^15,17..21): mod_base = OTHER; note = Phosphorothioate linkage
  modified_base 15^16: mod_base = OTHER; note = Methylphosphonate linkage
  misc_feature 1..21: note = RM106629
catgatgccatacnntgccac

SEQ ID NO: 162 - DNA, 19 bp, synthetic construct
  source 1..19: mol_type = other DNA
  misc_feature 14..15: note = DNA
  misc_feature order(1..13,16..19): note = RNA
  modified_base 2: mod_base = OTHER; note = 2-Prime-O-Methoxyethyl modified nucleoside
  modified_base order(1,13,18): mod_base = OTHER; note = 2-Prime-O-Methoxyethyl modified 5-methyl Cytidine
  modified_base 3: mod_base = OTHER; note = 2-Prime-O-Methoxyethyl modified 5-methyl Uridine
  modified_base 14: mod_base = OTHER; note = DNA nucleotide carrying a 6-amino-5-nitro-3-yl-2(1H)-pyridone nucleobase
  modified_base 15: mod_base = OTHER; note = DNA nucleotide carrying a hypoxanthine nucleobase
  modified_base order(8,10,12,17,19): mod_base = OTHER; note = 2-Prime-Fluoro modified nucleoside
  modified_base order(4..7,9,11,16): mod_base = OTHER; note = 2-Prime-O-Methyl modified nucleoside
  modified_base order(4..13,14^15,17..19): mod_base = OTHER; note = Phosphorothioate linkage
  modified_base 15^16: mod_base = OTHER; note = Methylphosphonate linkage
  misc_feature 1..19: note = RM106630
catgatgccatacnntgcc

SEQ ID NO: 163 - DNA, 30 bp, synthetic construct; identical to SEQ ID NO: 29
  source 1..30: mol_type = other DNA
  misc_feature 23..25: note = DNA
  misc_feature order(1..22,26..30): note = RNA
  modified_base 24: mod_base = OTHER; note = DNA nucleotide carrying a 6-amino-5-nitro-3-yl-2(1H)-pyridone nucleobase
  modified_base 25: mod_base = OTHER; note = DNA nucleotide carrying a hypoxanthine nucleobase
  modified_base order(4..5,8..9,11,13..15,17..19,22,27): mod_base = OTHER; note = 2-Prime-Fluoro modified nucleoside
  modified_base order(1..3,6..7,10,12,16,20..21,26,28..30): mod_base = OTHER; note = 2-Prime-O-Methyl modified nucleoside
  modified_base order(1^2,11^12,14^15,25^26,29^30): mod_base = OTHER; note = (1,3-dimethylimidazolidin-2-ylidene) Phosphoramidate linkage
  modified_base order(2..6,7..9,10^11,13^14,16..20,22..25,27..29): mod_base = OTHER; note = Phosphorothioate linkage
  modified_base 23: mod_base = m5c; note = 5-methylcytidine
  misc_feature 1..30: note = RM106631

SEQ ID NO: 164 - DNA, 30 bp, synthetic construct; identical to SEQ ID NO: 29
  source 1..30: mol_type = other DNA
  misc_feature 24..25: note = DNA
  misc_feature order(1..23,26..30): note = RNA
  modified_base order(23,28): mod_base = OTHER; note = 2-Prime-O-Methoxyethyl modified 5-methyl Cytidine
  modified_base 24: mod_base = OTHER; note = DNA nucleotide carrying a 6-amino-5-nitro-3-yl-2(1H)-pyridone nucleobase
  modified_base 25: mod_base = OTHER; note = DNA nucleotide carrying a hypoxanthine nucleobase
  modified_base order(4..5,8..9,11,13..15,17..19,22,27): mod_base = OTHER; note = 2-Prime-Fluoro modified nucleoside
  modified_base order(1..3,6..7,10,12,16,20..21,26,29..30): mod_base = OTHER; note = 2-Prime-O-Methyl modified nucleoside
  modified_base order(1^2,11^12,14^15,29^30): mod_base = OTHER; note = (1,3-dimethylimidazolidin-2-ylidene) Phosphoramidate linkage
  modified_base order(2..6,7..9,10^11,13^14,16..20,22^23,24^25,27..29): mod_base = OTHER; note = Phosphorothioate linkage
  modified_base 25^26: mod_base = OTHER; note = Methylphosphonate linkage
  misc_feature 1..30: note = RM106632

SEQ ID NO: 165 - DNA, 30 bp, synthetic construct; identical to SEQ ID NO: 29
  source 1..30: mol_type = other DNA
  misc_feature 23..25: note = DNA
  misc_feature order(1..22,26..30): note = RNA
  modified_base order(6..7,10,20): mod_base = OTHER; note = 2-Prime-O-Methoxyethyl modified nucleoside
  modified_base order(16,21): mod_base = OTHER; note = 2-Prime-O-Methoxyethyl modified 5-methyl Uridine
  modified_base 24: mod_base = OTHER; note = DNA nucleotide carrying a 6-amino-5-nitro-3-yl-2(1H)-pyridone nucleobase
  modified_base 25: mod_base = OTHER; note = DNA nucleotide carrying a hypoxanthine nucleobase
  modified_base order(4..5,8,13..14,18..19,22,27): mod_base = OTHER; note = 2-Prime-Fluoro modified nucleoside
  modified_base order(1..3,9,11..12,15,17,26,28..30): mod_base = OTHER; note = 2-Prime-O-Methyl modified nucleoside
  modified_base order(1^2,11^12,14^15,19^20,25^26,29^30): mod_base = OTHER; note = (1,3-dimethylimidazolidin-2-ylidene) Phosphoramidate linkage
  modified_base order(2..6,8^9,10^11,13^14,17..19,22..25,27..29): mod_base = OTHER; note = Phosphorothioate linkage
  modified_base 23: mod_base = m5c; note = 5-methylcytidine
  misc_feature 1..30: note = RM106633

SEQ ID NO: 166 - DNA, 30 bp, synthetic construct; identical to SEQ ID NO: 29
  source 1..30: mol_type = other DNA
  misc_feature 24..25: note = DNA
  misc_feature order(1..23,26..30): note = RNA
  modified_base order(6..7,10,20): mod_base = OTHER; note = 2-Prime-O-Methoxyethyl modified nucleoside
  modified_base order(23,28): mod_base = OTHER; note = 2-Prime-O-Methoxyethyl modified 5-methyl Cytidine
  modified_base order(16,21): mod_base = OTHER; note = 2-Prime-O-Methoxyethyl modified 5-methyl Uridine
  modified_base 24: mod_base = OTHER; note = DNA nucleotide carrying a 6-amino-5-nitro-3-yl-2(1H)-pyridone nucleobase
  modified_base 25: mod_base = OTHER; note = DNA nucleotide carrying a hypoxanthine nucleobase
  modified_base order(4..5,8,13..14,18..19,22,27): mod_base = OTHER; note = 2-Prime-Fluoro modified nucleoside
  modified_base order(1..3,9,11..12,15,17,26,29..30): mod_base = OTHER; note = 2-Prime-O-Methyl modified nucleoside
  modified_base order(1^2,11^12,14^15,19^20,29^30): mod_base = OTHER; note = (1,3-dimethylimidazolidin-2-ylidene) Phosphoramidate linkage
  modified_base order(2..6,8^9,10^11,13^14,17..19,22^23,24^25,27..29): mod_base = OTHER; note = Phosphorothioate linkage
  modified_base 25^26: mod_base = OTHER; note = Methylphosphonate linkage
  misc_feature 1..30: note = RM106634

SEQ ID NO: 167 - DNA, 23 bp, synthetic construct
  source 1..23: mol_type = other DNA
  misc_feature 18..19: note = DNA
  misc_feature order(1..17,20..23): note = RNA
  modified_base 17: mod_base = OTHER; note = 2-Prime-O-Methoxyethyl modified 5-methyl Cytidine
  modified_base 18: mod_base = OTHER; note = DNA nucleotide carrying a 6-amino-5-nitro-3-yl-2(1H)-pyridone nucleobase
  modified_base 19: mod_base = OTHER; note = DNA nucleotide carrying a hypoxanthine nucleobase
  modified_base 21: mod_base = OTHER; note = 2-Prime-Fluoro modified nucleoside
  modified_base order(1..16,20,22..23): mod_base = OTHER; note = 2-Prime-O-Methyl modified nucleoside
  modified_base order(1^2,22^23): mod_base = OTHER; note = (1,3-dimethylimidazolidin-2-ylidene) Phosphoramidate linkage
  modified_base order(2..19,20..22): mod_base = OTHER; note = Phosphorothioate linkage
  modified_base 19^20: mod_base = OTHER; note = Methylphosphonate linkage
  misc_feature 1..23: note = RM108942
ggggcatgatgccatacnntgcc

SEQ ID NO: 168 - DNA, 23 bp, synthetic construct
  source 1..23: mol_type = other DNA
  misc_feature 15..16: note = DNA
  misc_feature order(1..14,17..23): note = RNA
  modified_base 14: mod_base = OTHER; note = 2-Prime-O-Methoxyethyl modified 5-methyl Cytidine
  modified_base 15: mod_base = OTHER; note = DNA nucleotide carrying a 6-amino-5-nitro-3-yl-2(1H)-pyridone nucleobase
  modified_base 16: mod_base = OTHER; note = DNA nucleotide carrying a hypoxanthine nucleobase
  modified_base 18: mod_base = OTHER; note = 2-Prime-Fluoro modified nucleoside
  modified_base order(1..13,17,19..23): mod_base = OTHER; note = 2-Prime-O-Methyl modified nucleoside
  modified_base order(1^2,22^23): mod_base = OTHER; note = (1,3-dimethylimidazolidin-2-ylidene) Phosphoramidate linkage
  modified_base order(2..16,17..22): mod_base = OTHER; note = Phosphorothioate linkage
  modified_base 16^17: mod_base = OTHER; note = Methylphosphonate linkage
  misc_feature 1..23: note = RM108943
gcatgatgccatacnntgccacc

SEQ ID NO: 169 - DNA, 23 bp, synthetic construct
  source 1..23: mol_type = other DNA
  misc_feature 12..13: note = DNA
  misc_feature order(1..11,14..23): note = RNA
  modified_base 11: mod_base = OTHER; note = 2-Prime-O-Methoxyethyl modified 5-methyl Cytidine
  modified_base 12: mod_base = OTHER; note = DNA nucleotide carrying a 6-amino-5-nitro-3-yl-2(1H)-pyridone nucleobase
  modified_base 13: mod_base = OTHER; note = DNA nucleotide carrying a hypoxanthine nucleobase
  modified_base 15: mod_base = OTHER; note = 2-Prime-Fluoro modified nucleoside
  modified_base order(1..10,14,16..23): mod_base = OTHER; note = 2-Prime-O-Methyl modified nucleoside
  modified_base order(1^2,22^23): mod_base = OTHER; note = (1,3-dimethylimidazolidin-2-ylidene) Phosphoramidate linkage
  modified_base order(2..13,14..22): mod_base = OTHER; note = Phosphorothioate linkage
  modified_base 13^14: mod_base = OTHER; note = Methylphosphonate linkage
  misc_feature 1..23: note = RM108944
tgatgccatacnntgccaccagg

SEQ ID NO: 170 - DNA, 23 bp, synthetic construct
  source 1..23: mol_type = other DNA
  misc_feature 9..10: note = DNA
  misc_feature order(1..8,11..23): note = RNA
  modified_base 8: mod_base = OTHER; note = 2-Prime-O-Methoxyethyl modified 5-methyl Cytidine
  modified_base 9: mod_base = OTHER; note = DNA nucleotide carrying a 6-amino-5-nitro-3-yl-2(1H)-pyridone nucleobase
  modified_base 10: mod_base = OTHER; note = DNA nucleotide carrying a hypoxanthine nucleobase
  modified_base 12: mod_base = OTHER; note = 2-Prime-Fluoro modified nucleoside
  modified_base order(1..7,11,13..23): mod_base = OTHER; note = 2-Prime-O-Methyl modified nucleoside
  modified_base order(1^2,22^23): mod_base = OTHER; note = (1,3-dimethylimidazolidin-2-ylidene) Phosphoramidate linkage
  modified_base order(2..10,11..22): mod_base = OTHER; note = Phosphorothioate linkage
  modified_base 10^11: mod_base = OTHER; note = Methylphosphonate linkage
  misc_feature 1..23: note = RM108945
tgccatacnntgccaccagggcg

SEQ ID NO: 171 - DNA, 23 bp, synthetic construct
  source 1..23: mol_type = other DNA
  misc_feature 6..7: note = DNA
  misc_feature order(1..5,8..23): note = RNA
  modified_base 5: mod_base = OTHER; note = 2-Prime-O-Methoxyethyl modified 5-methyl Cytidine
  modified_base 6: mod_base = OTHER; note = DNA nucleotide carrying a 6-amino-5-nitro-3-yl-2(1H)-pyridone nucleobase
  modified_base 7: mod_base = OTHER; note = DNA nucleotide carrying a hypoxanthine nucleobase
  modified_base 9: mod_base = OTHER; note = 2-Prime-Fluoro modified nucleoside
  modified_base order(1..4,8,10..23): mod_base = OTHER; note = 2-Prime-O-Methyl modified nucleoside
  modified_base order(1^2,22^23): mod_base = OTHER; note = (1,3-dimethylimidazolidin-2-ylidene) Phosphoramidate linkage
  modified_base order(2..7,8..22): mod_base = OTHER; note = Phosphorothioate linkage
  modified_base 7^8: mod_base = OTHER; note = Methylphosphonate linkage
  misc_feature 1..23: note = RM108946
catacnntgccaccagggcgatg

SEQ ID NO: 172 - DNA, 26 bp, synthetic construct
  source 1..26: mol_type = other DNA
  misc_feature 22..23: note = DNA
  misc_feature order(1..21,24..26): note = RNA
  modified_base 21: mod_base = OTHER; note = 2-Prime-O-Methoxyethyl modified 5-methyl Cytidine
  modified_base 22: mod_base = OTHER; note = DNA nucleotide carrying a 6-amino-5-nitro-3-yl-2(1H)-pyridone nucleobase
  modified_base 23: mod_base = OTHER; note = DNA nucleotide carrying a hypoxanthine nucleobase
  modified_base 25: mod_base = OTHER; note = 2-Prime-Fluoro modified nucleoside
  modified_base order(1..20,24,26): mod_base = OTHER; note = 2-Prime-O-Methyl modified nucleoside
  modified_base order(1^2,25^26): mod_base = OTHER; note = (1,3-dimethylimidazolidin-2-ylidene) Phosphoramidate linkage
  modified_base order(2..23,24^25): mod_base = OTHER; note = Phosphorothioate linkage
  modified_base 23^24: mod_base = OTHER; note = Methylphosphonate linkage
  misc_feature 1..26: note = RM108947
gtgaggggcatgatgccatacnntgc

SEQ ID NO: 173 - DNA, 26 bp, synthetic construct
  source 1..26: mol_type = other DNA
  misc_feature 19..20: note = DNA
  misc_feature order(1..18,21..26): note = RNA
  modified_base 18: mod_base = OTHER; note = 2-Prime-O-Methoxyethyl modified 5-methyl Cytidine
  modified_base 19: mod_base = OTHER; note = DNA nucleotide carrying a 6-amino-5-nitro-3-yl-2(1H)-pyridone nucleobase
  modified_base 20: mod_base = OTHER; note = DNA nucleotide carrying a hypoxanthine nucleobase
  modified_base 22: mod_base = OTHER; note = 2-Prime-Fluoro modified nucleoside
  modified_base order(1..17,21,23..26): mod_base = OTHER; note = 2-Prime-O-Methyl modified nucleoside
  modified_base order(1^2,25^26): mod_base = OTHER; note = (1,3-dimethylimidazolidin-2-ylidene) Phosphoramidate linkage
  modified_base order(2..20,21..25): mod_base = OTHER; note = Phosphorothioate linkage
  modified_base 20^21: mod_base = OTHER; note = Methylphosphonate linkage
  misc_feature 1..26: note = RM108948
aggggcatgatgccatacnntgccac

SEQ ID NO: 174 - DNA, 26 bp, synthetic construct
  source 1..26: mol_type = other DNA
  misc_feature 16..17: note = DNA
  misc_feature order(1..15,18..26): note = RNA
  modified_base 15: mod_base = OTHER; note = 2-Prime-O-Methoxyethyl modified 5-methyl Cytidine
  modified_base 16: mod_base = OTHER; note = DNA nucleotide carrying a 6-amino-5-nitro-3-yl-2(1H)-pyridone nucleobase
  modified_base 17: mod_base = OTHER; note = DNA nucleotide carrying a hypoxanthine nucleobase
  modified_base 19: mod_base = OTHER; note = 2-Prime-Fluoro modified nucleoside
  modified_base order(1..14,18,20..26): mod_base = OTHER; note = 2-Prime-O-Methyl modified nucleoside
  modified_base order(1^2,25^26): mod_base = OTHER; note = (1,3-dimethylimidazolidin-2-ylidene) Phosphoramidate linkage
  modified_base order(2..17,18..25): mod_base = OTHER; note = Phosphorothioate linkage
  modified_base 17^18: mod_base = OTHER; note = Methylphosphonate linkage
  misc_feature 1..26: note = RM108949
ggcatgatgccatacnntgccaccag

SEQ ID NO: 175 - DNA, 26 bp, synthetic construct
  source 1..26: mol_type = other DNA
  misc_feature 13..14: note = DNA
  misc_feature order(1..12,15..26): note = RNA
  modified_base 12: mod_base = OTHER; note = 2-Prime-O-Methoxyethyl modified 5-methyl Cytidine
  modified_base 13: mod_base = OTHER; note = DNA nucleotide carrying a 6-amino-5-nitro-3-yl-2(1H)-pyridone nucleobase
  modified_base 14: mod_base = OTHER; note = DNA nucleotide carrying a hypoxanthine nucleobase
  modified_base 16: mod_base = OTHER; note = 2-Prime-Fluoro modified nucleoside
  modified_base order(1..11,15,17..26): mod_base = OTHER; note = 2-Prime-O-Methyl modified nucleoside
  modified_base order(1^2,25^26): mod_base = OTHER; note = (1,3-dimethylimidazolidin-2-ylidene) Phosphoramidate linkage
  modified_base order(2..14,15..25): mod_base = OTHER; note = Phosphorothioate linkage
  modified_base 14^15: mod_base = OTHER; note = Methylphosphonate linkage
  misc_feature 1..26: note = RM108950
atgatgccatacnntgccaccagggc

SEQ ID NO: 176 - DNA, 26 bp, synthetic construct
  source 1..26: mol_type = other DNA
  misc_feature 10..11: note = DNA
  misc_feature order(1..9,12..26): note = RNA
  modified_base 9: mod_base = OTHER; note = 2-Prime-O-Methoxyethyl modified 5-methyl Cytidine
  modified_base 10: mod_base = OTHER; note = DNA nucleotide carrying a 6-amino-5-nitro-3-yl-2(1H)-pyridone nucleobase
  modified_base 11: mod_base = OTHER; note = DNA nucleotide carrying a hypoxanthine nucleobase
  modified_base 13: mod_base = OTHER; note = 2-Prime-Fluoro modified nucleoside
  modified_base order(1..8,12,14..26): mod_base = OTHER; note = 2-Prime-O-Methyl modified nucleoside
  modified_base order(1^2,25^26): mod_base = OTHER; note = (1,3-dimethylimidazolidin-2-ylidene) Phosphoramidate linkage
  modified_base order(2..11,12..25): mod_base = OTHER; note = Phosphorothioate linkage
  modified_base 11^12: mod_base = OTHER; note = Methylphosphonate linkage
  misc_feature 1..26: note = RM108951
atgccatacnntgccaccagggcgat

SEQ ID NO: 177 - DNA, 26 bp, synthetic construct
  source 1..26: mol_type = other DNA
  misc_feature 7..8: note = DNA
  misc_feature order(1..6,9..26): note = RNA
  modified_base 6: mod_base = OTHER; note = 2-Prime-O-Methoxyethyl modified 5-methyl Cytidine
  modified_base 7: mod_base = OTHER; note = DNA nucleotide carrying a 6-amino-5-nitro-3-yl-2(1H)-pyridone nucleobase
  modified_base 8: mod_base = OTHER; note = DNA nucleotide carrying a hypoxanthine nucleobase
  modified_base 10: mod_base = OTHER; note = 2-Prime-Fluoro modified nucleoside
  modified_base order(1..5,9,11..26): mod_base = OTHER; note = 2-Prime-O-Methyl modified nucleoside
  modified_base order(1^2,25^26): mod_base = OTHER; note = (1,3-dimethylimidazolidin-2-ylidene) Phosphoramidate linkage
  modified_base order(2..8,9..25): mod_base = OTHER; note = Phosphorothioate linkage
  modified_base 8^9: mod_base = OTHER; note = Methylphosphonate linkage
  misc_feature 1..26: note = RM108952
ccatacnntgccaccagggcgatggc

SEQ ID NO: 178 - DNA, 29 bp, synthetic construct
  source 1..29: mol_type = other DNA
  misc_feature 24..25: note = DNA
  misc_feature order(1..23,26..29): note = RNA
  modified_base 23: mod_base = OTHER; note = 2-Prime-O-Methoxyethyl modified 5-methyl Cytidine
  modified_base 24: mod_base = OTHER; note = DNA nucleotide carrying a 6-amino-5-nitro-3-yl-2(1H)-pyridone nucleobase
  modified_base 25: mod_base = OTHER; note = DNA nucleotide carrying a hypoxanthine nucleobase
  modified_base 27: mod_base = OTHER; note = 2-Prime-Fluoro modified nucleoside
  modified_base order(1..22,26,28..29): mod_base = OTHER; note = 2-Prime-O-Methyl modified nucleoside
  modified_base order(1^2,28^29): mod_base = OTHER; note = (1,3-dimethylimidazolidin-2-ylidene) Phosphoramidate linkage
  modified_base order(2..25,26..28): mod_base = OTHER; note = Phosphorothioate linkage
  modified_base 25^26: mod_base = OTHER; note = Methylphosphonate linkage
  misc_feature 1..29: note = RM108953
ccgtgaggggcatgatgccatacnntgcc

SEQ ID NO: 179 - DNA, 29 bp, synthetic construct
  source 1..29: mol_type = other DNA
  misc_feature 21..22: note = DNA
  misc_feature order(1..20,23..29): note = RNA
  modified_base 20: mod_base = OTHER; note = 2-Prime-O-Methoxyethyl modified 5-methyl Cytidine
  modified_base 21: mod_base = OTHER; note = DNA nucleotide carrying a 6-amino-5-nitro-3-yl-2(1H)-pyridone nucleobase
  modified_base 22: mod_base = OTHER; note = DNA nucleotide carrying a hypoxanthine nucleobase
  modified_base 24: mod_base = OTHER; note = 2-Prime-Fluoro modified nucleoside
  modified_base order(1..19,23,25..29): mod_base = OTHER; note = 2-Prime-O-Methyl modified nucleoside
  modified_base order(1^2,28^29): mod_base = OTHER; note = (1,3-dimethylimidazolidin-2-ylidene) Phosphoramidate linkage
  modified_base order(2..22,23..28): mod_base = OTHER; note = Phosphorothioate linkage
  modified_base 22^23: mod_base = OTHER; note = Methylphosphonate linkage
  misc_feature 1..29: note = RM108954
tgaggggcatgatgccatacnntgccacc

SEQ ID NO: 180 - DNA, 29 bp, synthetic construct
  source 1..29: mol_type = other DNA
  misc_feature 18..19: note = DNA
  misc_feature order(1..17,20..29): note = RNA
  modified_base 17: mod_base = OTHER; note = 2-Prime-O-Methoxyethyl modified 5-methyl Cytidine
  modified_base 18: mod_base = OTHER; note = DNA nucleotide carrying a 6-amino-5-nitro-3-yl-2(1H)-pyridone nucleobase
  modified_base 19: mod_base = OTHER; note = DNA nucleotide carrying a hypoxanthine nucleobase
  modified_base 21: mod_base = OTHER; note = 2-Prime-Fluoro modified nucleoside
  modified_base order(1..16,20,22..29): mod_base = OTHER; note = 2-Prime-O-Methyl modified nucleoside
  modified_base order(1^2,28^29): mod_base = OTHER; note = (1,3-dimethylimidazolidin-2-ylidene) Phosphoramidate linkage
  modified_base order(2..19,20..28): mod_base = OTHER; note = Phosphorothioate linkage
  modified_base 19^20: mod_base = OTHER; note = Methylphosphonate linkage
  misc_feature 1..29: note = RM108955
ggggcatgatgccatacnntgccaccagg

SEQ ID NO: 181 - DNA, 29 bp, synthetic construct
  source 1..29: mol_type = other DNA
  misc_feature 15..16: note = DNA
  misc_feature order(1..14,17..29): note = RNA
  modified_base 14: mod_base = OTHER; note = 2-Prime-O-Methoxyethyl modified 5-methyl Cytidine
  modified_base 15: mod_base = OTHER; note = DNA nucleotide carrying a 6-amino-5-nitro-3-yl-2(1H)-pyridone nucleobase
  modified_base 16: mod_base = OTHER; note = DNA nucleotide carrying a hypoxanthine nucleobase
  modified_base 18: mod_base = OTHER; note = 2-Prime-Fluoro modified nucleoside
  modified_base order(1..13,17,19..29): mod_base = OTHER; note = 2-Prime-O-Methyl modified nucleoside
  modified_base order(1^2,28^29): mod_base = OTHER; note = (1,3-dimethylimidazolidin-2-ylidene) Phosphoramidate linkage
  modified_base order(2..16,17..28): mod_base = OTHER; note = Phosphorothioate linkage
  modified_base 16^17: mod_base = OTHER; note = Methylphosphonate linkage
  misc_feature 1..29: note = RM108956
gcatgatgccatacnntgccaccagggcg

SEQ ID NO: 182 - DNA, 29 bp, synthetic construct
  source 1..29: mol_type = other DNA
  misc_feature 12..13: note = DNA
  misc_feature order(1..11,14..29): note = RNA
  modified_base 11: mod_base = OTHER; note = 2-Prime-O-Methoxyethyl modified 5-methyl Cytidine
  modified_base 12: mod_base = OTHER; note = DNA nucleotide carrying a 6-amino-5-nitro-3-yl-2(1H)-pyridone nucleobase
  modified_base 13: mod_base = OTHER; note = DNA nucleotide carrying a hypoxanthine nucleobase
  modified_base 15: mod_base = OTHER; note = 2-Prime-Fluoro modified nucleoside
  modified_base order(1..10,14,16..29): mod_base = OTHER; note = 2-Prime-O-Methyl modified nucleoside
  modified_base order(1^2,28^29): mod_base = OTHER; note = (1,3-dimethylimidazolidin-2-ylidene) Phosphoramidate linkage
  modified_base order(2..13,14..28): mod_base = OTHER; note = Phosphorothioate linkage
  modified_base 13^14: mod_base = OTHER; note = Methylphosphonate linkage
  misc_feature 1..29: note = RM108957
tgatgccatacnntgccaccagggcgatg

SEQ ID NO: 183 - DNA, 29 bp, synthetic construct
  source 1..29: mol_type = other DNA
  misc_feature 9..10: note = DNA
  misc_feature order(1..8,11..29): note = RNA
  modified_base 8: mod_base = OTHER; note = 2-Prime-O-Methoxyethyl modified 5-methyl Cytidine
  modified_base 9: mod_base = OTHER; note = DNA nucleotide carrying a 6-amino-5-nitro-3-yl-2(1H)-pyridone nucleobase
  modified_base 10: mod_base = OTHER; note = DNA nucleotide carrying a hypoxanthine nucleobase
  modified_base 12: mod_base = OTHER; note = 2-Prime-Fluoro modified nucleoside
  modified_base order(1..7,11,13..29): mod_base = OTHER; note = 2-Prime-O-Methyl modified nucleoside
  modified_base order(1^2,28^29): mod_base = OTHER; note = (1,3-dimethylimidazolidin-2-ylidene) Phosphoramidate linkage
  modified_base order(2..10,11..28): mod_base = OTHER; note = Phosphorothioate linkage
  modified_base 10^11: mod_base = OTHER; note = Methylphosphonate linkage
  misc_feature 1..29: note = RM108958
tgccatacnntgccaccagggcgatggcc

SEQ ID NO: 184 - DNA, 29 bp, synthetic construct
  source 1..29: mol_type = other DNA
  misc_feature 6..7: note = DNA
  misc_feature order(1..5,8..29): note = RNA
  modified_base 5: mod_base = OTHER; note = 2-Prime-O-Methoxyethyl modified 5-methyl Cytidine
  modified_base 6: mod_base = OTHER; note = DNA nucleotide carrying a 6-amino-5-nitro-3-yl-2(1H)-pyridone nucleobase
  modified_base 7: mod_base = OTHER; note = DNA nucleotide carrying a hypoxanthine nucleobase
  modified_base 9: mod_base = OTHER; note = 2-Prime-Fluoro modified nucleoside
  modified_base order(1..4,8,10..29): mod_base = OTHER; note = 2-Prime-O-Methyl modified nucleoside
  modified_base order(1^2,28^29): mod_base = OTHER; note = (1,3-dimethylimidazolidin-2-ylidene) Phosphoramidate linkage
  modified_base order(2..7,8..28): mod_base = OTHER; note = Phosphorothioate linkage
  modified_base 7^8: mod_base = OTHER; note = Methylphosphonate linkage
  misc_feature 1..29: note = RM108959
catacnntgccaccagggcgatggccagc

SEQ ID NO: 185 - DNA, 32 bp, synthetic construct
  source 1..32: mol_type = other DNA
  misc_feature 28..29: note = DNA
  misc_feature order(1..27,30..32): note = RNA
  modified_base 27: mod_base = OTHER; note = 2-Prime-O-Methoxyethyl modified 5-methyl Cytidine
  modified_base 28: mod_base = OTHER; note = DNA nucleotide carrying a 6-amino-5-nitro-3-yl-2(1H)-pyridone nucleobase
  modified_base 29: mod_base = OTHER; note = DNA nucleotide carrying a hypoxanthine nucleobase
  modified_base 31: mod_base = OTHER; note = 2-Prime-Fluoro modified nucleoside
  modified_base order(1..26,30,32): mod_base = OTHER; note = 2-Prime-O-Methyl modified nucleoside
  modified_base order(1^2,31^32): mod_base = OTHER; note = (1,3-dimethylimidazolidin-2-ylidene) Phosphoramidate linkage
  modified_base order(2..29,30^31): mod_base = OTHER; note = Phosphorothioate linkage
  modified_base 29^30: mod_base = OTHER; note = Methylphosphonate linkage
  misc_feature 1..32: note = RM108960
aaggccgtgaggggcatgatgccatacnntgc

SEQ ID NO: 186 - DNA, 32 bp, synthetic construct
  source 1..32: mol_type = other DNA
  misc_feature 25..26: note = DNA
  misc_feature order(1..24,27..32): note = RNA
  modified_base 24: mod_base = OTHER; note = 2-Prime-O-Methoxyethyl modified 5-methyl Cytidine
  modified_base 25: mod_base = OTHER; note = DNA nucleotide carrying a 6-amino-5-nitro-3-yl-2(1H)-pyridone nucleobase
  modified_base 26: mod_base = OTHER; note = DNA nucleotide carrying a hypoxanthine nucleobase
  modified_base 28: mod_base = OTHER; note = 2-Prime-Fluoro modified nucleoside
  modified_base order(1..23,27,29..32): mod_base = OTHER; note = 2-Prime-O-Methyl modified nucleoside
  modified_base order(1^2,31^32): mod_base = OTHER; note = (1,3-dimethylimidazolidin-2-ylidene) Phosphoramidate linkage
  modified_base order(2..26,27..31): mod_base = OTHER; note = Phosphorothioate linkage
  modified_base 26^27: mod_base = OTHER; note = Methylphosphonate linkage
  misc_feature 1..32: note = RM108961
gccgtgaggggcatgatgccatacnntgccac

SEQ ID NO: 187 - DNA, 32 bp, synthetic construct
  source 1..32: mol_type = other DNA
  misc_feature 22..23: note = DNA
  misc_feature order(1..21,24..32): note = RNA
  modified_base 21: mod_base = OTHER; note = 2-Prime-O-Methoxyethyl modified 5-methyl Cytidine
  modified_base 22: mod_base = OTHER; note = DNA nucleotide carrying a 6-amino-5-nitro-3-yl-2(1H)-pyridone nucleobase
  modified_base 23: mod_base = OTHER; note = DNA nucleotide carrying a hypoxanthine nucleobase
  modified_base 25: mod_base = OTHER; note = 2-Prime-Fluoro modified nucleoside
  modified_base order(1..20,24,26..32): mod_base = OTHER; note = 2-Prime-O-Methyl modified nucleoside
  modified_base order(1^2,31^32): mod_base = OTHER; note = (1,3-dimethylimidazolidin-2-ylidene) Phosphoramidate linkage
  modified_base order(2..23,24..31): mod_base = OTHER; note = Phosphorothioate linkage
  modified_base 23^24: mod_base = OTHER; note = Methylphosphonate linkage
  misc_feature 1..32: note = RM108962
gtgaggggcatgatgccatacnntgccaccag

SEQ ID NO: 188 - DNA, 32 bp, synthetic construct; identical to SEQ ID NO: 5
  source 1..32: mol_type = other DNA
  misc_feature 19..20: note = DNA
  misc_feature order(1..18,21..32): note = RNA
  modified_base 18: mod_base = OTHER; note = 2-Prime-O-Methoxyethyl modified 5-methyl Cytidine
  modified_base 19: mod_base = OTHER; note = DNA nucleotide carrying a 6-amino-5-nitro-3-yl-2(1H)-pyridone nucleobase
  modified_base 20: mod_base = OTHER; note = DNA nucleotide carrying a hypoxanthine nucleobase
  modified_base 22: mod_base = OTHER; note = 2-Prime-Fluoro modified nucleoside
  modified_base order(1..17,21,23..32): mod_base = OTHER; note = 2-Prime-O-Methyl modified nucleoside
  modified_base order(1^2,31^32): mod_base = OTHER; note = (1,3-dimethylimidazolidin-2-ylidene) Phosphoramidate linkage
  modified_base order(2..20,21..31): mod_base = OTHER; note = Phosphorothioate linkage
  modified_base 20^21: mod_base = OTHER; note = Methylphosphonate linkage
  misc_feature 1..32: note = RM108963

SEQ ID NO: 189 - DNA, 32 bp, synthetic construct
  source 1..32: mol_type = other DNA
  misc_feature 16..17: note = DNA
  misc_feature order(1..15,18..32): note = RNA
  modified_base 15: mod_base = OTHER; note = 2-Prime-O-Methoxyethyl modified 5-methyl Cytidine
  modified_base 16: mod_base = OTHER; note = DNA nucleotide carrying a 6-amino-5-nitro-3-yl-2(1H)-pyridone nucleobase
  modified_base 17: mod_base = OTHER; note = DNA nucleotide carrying a hypoxanthine nucleobase
  modified_base 19: mod_base = OTHER; note = 2-Prime-Fluoro modified nucleoside
  modified_base order(1..14,18,20..32): mod_base = OTHER; note = 2-Prime-O-Methyl modified nucleoside
  modified_base order(1^2,31^32): mod_base = OTHER; note = (1,3-dimethylimidazolidin-2-ylidene) Phosphoramidate linkage
  modified_base order(2..17,18..31): mod_base = OTHER; note = Phosphorothioate linkage
  modified_base 17^18: mod_base = OTHER; note = Methylphosphonate linkage
  misc_feature 1..32: note = RM108964
ggcatgatgccatacnntgccaccagggcgat

SEQ ID NO: 190 - DNA, 32 bp, synthetic construct
  source 1..32: mol_type = other DNA
  misc_feature 13..14: note = DNA
  misc_feature order(1..12,15..32): note = RNA
  modified_base 12: mod_base = OTHER; note = 2-Prime-O-Methoxyethyl modified 5-methyl Cytidine
  modified_base 13: mod_base = OTHER; note = DNA nucleotide carrying a 6-amino-5-nitro-3-yl-2(1H)-pyridone nucleobase
  modified_base 14: mod_base = OTHER; note = DNA nucleotide carrying a hypoxanthine nucleobase
  modified_base 16: mod_base = OTHER; note = 2-Prime-Fluoro modified nucleoside
  modified_base order(1..11,15,17..32): mod_base = OTHER; note = 2-Prime-O-Methyl modified nucleoside
  modified_base order(1^2,31^32): mod_base = OTHER; note = (1,3-dimethylimidazolidin-2-ylidene) Phosphoramidate linkage
  modified_base order(2..14,15..31): mod_base = OTHER; note = Phosphorothioate linkage
  modified_base 14^15: mod_base = OTHER; note = Methylphosphonate linkage
  misc_feature 1..32: note = RM108965
atgatgccatacnntgccaccagggcgatggc

SEQ ID NO: 191 - DNA, 32 bp, synthetic construct
  source 1..32: mol_type = other DNA
  misc_feature 10..11: note = DNA
  misc_feature order(1..9,12..32): note = RNA
  modified_base 9: mod_base = OTHER; note = 2-Prime-O-Methoxyethyl modified 5-methyl Cytidine
  modified_base 10: mod_base = OTHER; note = DNA nucleotide carrying a 6-amino-5-nitro-3-yl-2(1H)-pyridone nucleobase
  modified_base 11: mod_base = OTHER; note = DNA nucleotide carrying a hypoxanthine nucleobase
  modified_base 13: mod_base = OTHER; note = 2-Prime-Fluoro modified nucleoside
  modified_base order(1..8,12,14..32): mod_base = OTHER; note = 2-Prime-O-Methyl modified nucleoside
  modified_base order(1^2,31^32): mod_base = OTHER; note = (1,3-dimethylimidazolidin-2-ylidene) Phosphoramidate linkage
  modified_base order(2..11,12..31): mod_base = OTHER; note = Phosphorothioate linkage
  modified_base 11^12: mod_base = OTHER; note = Methylphosphonate linkage
  misc_feature 1..32: note = RM108966
atgccatacnntgccaccagggcgatggccag

SEQ ID NO: 192 - DNA, 32 bp, synthetic construct
  source 1..32: mol_type = other DNA
  misc_feature 7..8: note = DNA
  misc_feature order(1..6,9..32): note = RNA
  modified_base 6: mod_base = OTHER; note = 2-Prime-O-Methoxyethyl modified 5-methyl Cytidine
  modified_base 7: mod_base = OTHER; note = DNA nucleotide carrying a 6-amino-5-nitro-3-yl-2(1H)-pyridone nucleobase
  modified_base 8: mod_base = OTHER; note = DNA nucleotide carrying a hypoxanthine nucleobase
  modified_base 10: mod_base = OTHER; note = 2-Prime-Fluoro modified nucleoside
  modified_base order(1..5,9,11..32): mod_base = OTHER; note = 2-Prime-O-Methyl modified nucleoside
  modified_base order(1^2,31^32): mod_base = OTHER; note = (1,3-dimethylimidazolidin-2-ylidene) Phosphoramidate linkage
  modified_base order(2..8,9..31): mod_base = OTHER; note = Phosphorothioate linkage
  modified_base 8^9: mod_base = OTHER; note = Methylphosphonate linkage
  misc_feature 1..32: note = RM108967
ccatacnntgccaccagggcgatggccagccc

SEQ ID NO: 193 - DNA, 26 bp, synthetic construct
  source 1..26: mol_type = other DNA
  misc_feature 16..17: note = DNA
  misc_feature order(1..15,18..26): note = RNA
  modified_base 15: mod_base = OTHER; note = 2-Prime-O-Methoxyethyl modified 5-methyl Cytidine
  modified_base 16: mod_base = OTHER; note = DNA nucleotide carrying a 6-amino-5-nitro-3-yl-2(1H)-pyridone nucleobase
  modified_base 17: mod_base = OTHER; note = DNA nucleotide carrying a hypoxanthine nucleobase
  modified_base order(9,11,13,19,22,24,26): mod_base = OTHER; note = 2-Prime-Fluoro modified nucleoside
  modified_base order(1..8,10,12,14,18,20..21,23,25): mod_base = OTHER; note = 2-Prime-O-Methyl modified nucleoside
  modified_base order(1^2,25^26): mod_base = OTHER; note = (1,3-dimethylimidazolidin-2-ylidene) Phosphoramidate linkage
  modified_base order(2..17,18..25): mod_base = OTHER; note = Phosphorothioate linkage
  modified_base 17^18: mod_base = OTHER; note = Methylphosphonate linkage
  misc_feature 1..26: note = RM108968
ggcatgatgccatacnntgccaccag

SEQ ID NO: 194 - DNA, 26 bp, synthetic construct
  source 1..26: mol_type = other DNA
  misc_feature 13..14: note = DNA
  misc_feature order(1..12,15..26): note = RNA
  modified_base 12: mod_base = OTHER; note = 2-Prime-O-Methoxyethyl modified 5-methyl Cytidine
  modified_base 13: mod_base = OTHER; note = DNA nucleotide carrying a 6-amino-5-nitro-3-yl-2(1H)-pyridone nucleobase
  modified_base 14: mod_base = OTHER; note = DNA nucleotide carrying a hypoxanthine nucleobase
  modified_base order(6,8,10,16,19,21,23): mod_base = OTHER; note = 2-Prime-Fluoro modified nucleoside
  modified_base order(1..5,7,9,11,15,17..18,20,22,24..26): mod_base = OTHER; note = 2-Prime-O-Methyl modified nucleoside
  modified_base order(1^2,25^26): mod_base = OTHER; note = (1,3-dimethylimidazolidin-2-ylidene) Phosphoramidate linkage
  modified_base order(2..14,15..25): mod_base = OTHER; note = Phosphorothioate linkage
  modified_base 14^15: mod_base = OTHER; note = Methylphosphonate linkage
  misc_feature 1..26: note = RM108969
atgatgccatacnntgccaccagggc

SEQ ID NO: 195 - DNA, 26 bp, synthetic construct
  source 1..26: mol_type = other DNA
  misc_feature 10..11: note = DNA
  misc_feature order(1..9,12..26): note = RNA
  modified_base 9: mod_base = OTHER; note = 2-Prime-O-Methoxyethyl modified 5-methyl Cytidine
  modified_base 10: mod_base = OTHER; note = DNA nucleotide carrying a 6-amino-5-nitro-3-yl-2(1H)-pyridone nucleobase
  modified_base 11: mod_base = OTHER; note = DNA nucleotide carrying a hypoxanthine nucleobase
  modified_base order(3,5,7,13,16,18,20): mod_base = OTHER; note = 2-Prime-Fluoro modified nucleoside
  modified_base order(1..2,4,6,8,12,14..15,17,19,21..26): mod_base = OTHER; note = 2-Prime-O-Methyl modified nucleoside
  modified_base order(1^2,25^26): mod_base = OTHER; note = (1,3-dimethylimidazolidin-2-ylidene) Phosphoramidate linkage
  modified_base order(2..11,12..25): mod_base = OTHER; note = Phosphorothioate linkage
  modified_base 11^12: mod_base = OTHER; note = Methylphosphonate linkage
  misc_feature 1..26: note = RM108970
atgccatacnntgccaccagggcgat

SEQ ID NO: 196 - DNA, 26 bp, synthetic construct
  source 1..26: mol_type = other DNA
  misc_feature 16..17: note = DNA
  misc_feature order(1..15,18..26): note = RNA
  modified_base 15: mod_base = OTHER; note = 2-Prime-O-Methoxyethyl modified 5-methyl Cytidine
  modified_base 16: mod_base = OTHER; note = DNA nucleotide carrying a 6-amino-5-nitro-3-yl-2(1H)-pyridone nucleobase
  modified_base 17: mod_base = OTHER; note = DNA nucleotide carrying a hypoxanthine nucleobase
  modified_base order(10,12,14,19,21,23,25): mod_base = OTHER; note = 2-Prime-Fluoro modified nucleoside
  modified_base order(1..9,11,13,18,20,22,24,26): mod_base = OTHER; note = 2-Prime-O-Methyl modified nucleoside
  modified_base order(1^2,25^26): mod_base = OTHER; note = (1,3-dimethylimidazolidin-2-ylidene) Phosphoramidate linkage
  modified_base order(2..17,18..25): mod_base = OTHER; note = Phosphorothioate linkage
  modified_base 17^18: mod_base = OTHER; note = Methylphosphonate linkage
  misc_feature 1..26: note = RM108971
ggcatgatgccatacnntgccaccag

SEQ ID NO: 197 - DNA, 26 bp, synthetic construct
  source 1..26: mol_type = other DNA
  misc_feature 13..14: note = DNA
  misc_feature order(1..12,15..26): note = RNA
  modified_base 12: mod_base = OTHER; note = 2-Prime-O-Methoxyethyl modified 5-methyl Cytidine
  modified_base 13: mod_base = OTHER; note = DNA nucleotide carrying a 6-amino-5-nitro-3-yl-2(1H)-pyridone nucleobase
  modified_base 14: mod_base = OTHER; note = DNA nucleotide carrying a hypoxanthine nucleobase
  modified_base order(7,9,11,16,18,20,22): mod_base = OTHER; note = 2-Prime-Fluoro modified nucleoside
  modified_base order(1..6,8,10,15,17,19,21,23..26): mod_base = OTHER; note = 2-Prime-O-Methyl modified nucleoside
  modified_base order(1^2,25^26): mod_base = OTHER; note = (1,3-dimethylimidazolidin-2-ylidene) Phosphoramidate linkage
  modified_base order(2..14,15..25): mod_base = OTHER; note = Phosphorothioate linkage
  modified_base 14^15: mod_base = OTHER; note = Methylphosphonate linkage
  misc_feature 1..26: note = RM108972
atgatgccatacnntgccaccagggc

SEQ ID NO: 198 - DNA, 26 bp, synthetic construct
  source 1..26: mol_type = other DNA
  misc_feature 10..11: note = DNA
  misc_feature order(1..9,12..26): note = RNA
  modified_base 9: mod_base = OTHER; note = 2-Prime-O-Methoxyethyl modified 5-methyl Cytidine
  modified_base 10: mod_base = OTHER; note = DNA nucleotide carrying a 6-amino-5-nitro-3-yl-2(1H)-pyridone nucleobase
  modified_base 11: mod_base = OTHER; note = DNA nucleotide carrying a hypoxanthine nucleobase
  modified_base order(4,6,8,13,15,17,19): mod_base = OTHER; note = 2-Prime-Fluoro modified nucleoside
  modified_base order(1..3,5,7,12,14,16,18,20..26): mod_base = OTHER; note = 2-Prime-O-Methyl modified nucleoside
  modified_base order(1^2,25^26): mod_base = OTHER; note = (1,3-dimethylimidazolidin-2-ylidene) Phosphoramidate linkage
  modified_base order(2..11,12..25): mod_base = OTHER; note = Phosphorothioate linkage
  modified_base 11^12: mod_base = OTHER; note = Methylphosphonate linkage
  misc_feature 1..26: note = RM108973
atgccatacnntgccaccagggcgat

SEQ ID NO: 199 - DNA, 26 bp, synthetic construct
  source 1..26: mol_type = other DNA
  misc_feature 7..8: note = DNA
  misc_feature order(1..6,9..26): note = RNA
  modified_base 6: mod_base = OTHER; note = 2-Prime-O-Methoxyethyl modified 5-methyl Cytidine
  modified_base 7: mod_base = OTHER; note = DNA nucleotide carrying a 6-amino-5-nitro-3-yl-2(1H)-pyridone nucleobase
  modified_base 8: mod_base = OTHER; note = DNA nucleotide carrying a hypoxanthine nucleobase
  modified_base order(1,3,5,10,12,14,16): mod_base = OTHER; note = 2-Prime-Fluoro modified nucleoside
  modified_base order(2,4,9,11,13,15,17..26): mod_base = OTHER; note = 2-Prime-O-Methyl modified nucleoside
  modified_base order(1^2,25^26): mod_base = OTHER; note = (1,3-dimethylimidazolidin-2-ylidene) Phosphoramidate linkage
  modified_base order(2..8,9..25): mod_base = OTHER; note = Phosphorothioate linkage
  modified_base 8^9: mod_base = OTHER; note = Methylphosphonate linkage
  misc_feature 1..26: note = RM108974
ccatacnntgccaccagggcgatggc

SEQ ID NO: 200 - DNA, 26 bp, synthetic construct
  source 1..26: mol_type = other DNA
  misc_feature 16..17: note = DNA
  misc_feature order(1..15,18..26): note = RNA
  modified_base 15: mod_base = OTHER; note = 2-Prime-O-Methoxyethyl modified 5-methyl Cytidine
  modified_base 16: mod_base = OTHER; note = DNA nucleotide carrying a 6-amino-5-nitro-3-yl-2(1H)-pyridone nucleobase
  modified_base 17: mod_base = OTHER; note = DNA nucleotide carrying a hypoxanthine nucleobase
  modified_base order(10,12,14,19,22,24,26): mod_base = OTHER; note = 2-Prime-Fluoro modified nucleoside
  modified_base order(1..9,11,13,18,20..21,23,25): mod_base = OTHER; note = 2-Prime-O-Methyl modified nucleoside
  modified_base order(1^2,25^26): mod_base = OTHER; note = (1,3-dimethylimidazolidin-2-ylidene) Phosphoramidate linkage
  modified_base order(2..17,18..25): mod_base = OTHER; note = Phosphorothioate linkage
  modified_base 17^18: mod_base = OTHER; note = Methylphosphonate linkage
  misc_feature 1..26: note = RM108975
ggcatgatgccatacnntgccaccag

SEQ ID NO: 201 - DNA, 26 bp, synthetic construct
  source 1..26: mol_type = other DNA
  misc_feature 13..14: note = DNA
  misc_feature order(1..12,15..26): note = RNA
  modified_base 12: mod_base = OTHER; note = 2-Prime-O-Methoxyethyl modified 5-methyl Cytidine
  modified_base 13: mod_base = OTHER; note = DNA nucleotide carrying a 6-amino-5-nitro-3-yl-2(1H)-pyridone nucleobase
  modified_base 14: mod_base = OTHER; note = DNA nucleotide carrying a hypoxanthine nucleobase
  modified_base order(7,9,11,16,19,21,23): mod_base = OTHER; note = 2-Prime-Fluoro modified nucleoside
  modified_base order(1..6,8,10,15,17..18,20,22,24..26): mod_base = OTHER; note = 2-Prime-O-Methyl modified nucleoside
  modified_base order(1^2,25^26): mod_base = OTHER; note = (1,3-dimethylimidazolidin-2-ylidene) Phosphoramidate linkage
  modified_base order(2..14,15..25): mod_base = OTHER; note = Phosphorothioate linkage
  modified_base 14^15: mod_base = OTHER; note = Methylphosphonate linkage
  misc_feature 1..26: note = RM108976
atgatgccatacnntgccaccagggc

SEQ ID NO: 202 - DNA, 26 bp, synthetic construct
  source 1..26: mol_type = other DNA
  misc_feature 10..11: note = DNA
  misc_feature order(1..9,12..26): note = RNA
  modified_base 9: mod_base = OTHER; note = 2-Prime-O-Methoxyethyl modified 5-methyl Cytidine
  modified_base 10: mod_base = OTHER; note = DNA nucleotide carrying a 6-amino-5-nitro-3-yl-2(1H)-pyridone nucleobase
  modified_base 11: mod_base = OTHER; note = DNA nucleotide carrying a hypoxanthine nucleobase
  modified_base order(4,6,8,13,16,18,20): mod_base = OTHER; note = 2-Prime-Fluoro modified nucleoside
  modified_base order(1..3,5,7,12,14..15,17,19,21..26): mod_base = OTHER; note = 2-Prime-O-Methyl modified nucleoside
  modified_base order(1^2,25^26): mod_base = OTHER; note = (1,3-dimethylimidazolidin-2-ylidene) Phosphoramidate linkage
  modified_base order(2..11,12..25): mod_base = OTHER; note = Phosphorothioate linkage
  modified_base 11^12: mod_base = OTHER; note = Methylphosphonate linkage
  misc_feature 1..26: note = RM108977
atgccatacnntgccaccagggcgat

SEQ ID NO: 203 - DNA, 26 bp, synthetic construct
  source 1..26: mol_type = other DNA
  misc_feature 7..8: note = DNA
  misc_feature order(1..6,9..26): note = RNA
  modified_base 6: mod_base = OTHER; note = 2-Prime-O-Methoxyethyl modified 5-methyl Cytidine
  modified_base 7: mod_base = OTHER; note = DNA nucleotide carrying a 6-amino-5-nitro-3-yl-2(1H)-pyridone nucleobase
  modified_base 8: mod_base = OTHER; note = DNA nucleotide carrying a hypoxanthine nucleobase
  modified_base order(1,3,5,10,13,15,17): mod_base = OTHER; note = 2-Prime-Fluoro modified nucleoside
  modified_base order(2,4,9,11..12,14,16,18..26): mod_base = OTHER; note = 2-Prime-O-Methyl modified nucleoside
  modified_base order(1^2,25^26): mod_base = OTHER; note = (1,3-dimethylimidazolidin-2-ylidene) Phosphoramidate linkage
  modified_base order(2..8,9..25): mod_base = OTHER; note = Phosphorothioate linkage
  modified_base 8^9: mod_base = OTHER; note = Methylphosphonate linkage
  misc_feature 1..26: note = RM108978
ccatacnntgccaccagggcgatggc

SEQ ID NO: 204 - DNA, 23 bp, synthetic construct
  source 1..23: mol_type = other DNA
  misc_feature 15..16: note = DNA
  misc_feature order(1..14,17..23): note = RNA
  modified_base 14: mod_base = OTHER; note = 2-Prime-O-Methoxyethyl modified 5-methyl Cytidine
  modified_base 15: mod_base = OTHER; note = DNA nucleotide carrying a 6-amino-5-nitro-3-yl-2(1H)-pyridone nucleobase
  modified_base 16: mod_base = OTHER; note = DNA nucleotide carrying a hypoxanthine nucleobase
  modified_base order(9,11,13,18,20,22): mod_base = OTHER; note = 2-Prime-Fluoro modified nucleoside
  modified_base order(1..8,10,12,17,19,21,23): mod_base = OTHER; note = 2-Prime-O-Methyl modified nucleoside
  modified_base order(1^2,22^23): mod_base = OTHER; note = (1,3-dimethylimidazolidin-2-ylidene) Phosphoramidate linkage
  modified_base order(2..16,17..22): mod_base = OTHER; note = Phosphorothioate linkage
  modified_base 16^17: mod_base = OTHER; note = Methylphosphonate linkage
  misc_feature 1..23: note = RM108979
gcatgatgccatacnntgccacc

SEQ ID NO: 205 - DNA, 23 bp, synthetic construct
  source 1..23: mol_type = other DNA
  misc_feature 12..13: note = DNA
  misc_feature order(1..11,14..23): note = RNA
  modified_base 11: mod_base = OTHER; note = 2-Prime-O-Methoxyethyl modified 5-methyl Cytidine
  modified_base 12: mod_base = OTHER; note = DNA nucleotide carrying a 6-amino-5-nitro-3-yl-2(1H)-pyridone nucleobase
  modified_base 13: mod_base = OTHER; note = DNA nucleotide carrying a hypoxanthine nucleobase
  modified_base order(6,8,10,15,17,19): mod_base = OTHER; note = 2-Prime-Fluoro modified nucleoside
  modified_base order(1..5,7,9,14,16,18,20..23): mod_base = OTHER; note = 2-Prime-O-Methyl modified nucleoside
  modified_base order(1^2,22^23): mod_base = OTHER; note = (1,3-dimethylimidazolidin-2-ylidene) Phosphoramidate linkage
  modified_base order(2..13,14..22): mod_base = OTHER; note = Phosphorothioate linkage
  modified_base 13^14: mod_base = OTHER; note = Methylphosphonate linkage
  misc_feature 1..23: note = RM108980
tgatgccatacnntgccaccagg

SEQ ID NO: 206 - DNA, 23 bp, synthetic construct
  source 1..23: mol_type = other DNA
  misc_feature 9..10: note = DNA
  misc_feature order(1..8,11..23): note = RNA
  modified_base 8: mod_base = OTHER; note = 2-Prime-O-Methoxyethyl modified 5-methyl Cytidine
  modified_base 9: mod_base = OTHER; note = DNA nucleotide carrying a 6-amino-5-nitro-3-yl-2(1H)-pyridone nucleobase
  modified_base 10: mod_base = OTHER; note = DNA nucleotide carrying a hypoxanthine nucleobase
  modified_base order(3,5,7,12,14,16): mod_base = OTHER; note = 2-Prime-Fluoro modified nucleoside
  modified_base order(1..2,4,6,11,13,15,17..23): mod_base = OTHER; note = 2-Prime-O-Methyl modified nucleoside
  modified_base order(1^2,22^23): mod_base = OTHER; note = (1,3-dimethylimidazolidin-2-ylidene) Phosphoramidate linkage
  modified_base order(2..10,11..22): mod_base = OTHER; note = Phosphorothioate linkage
  modified_base 10^11: mod_base = OTHER; note = Methylphosphonate linkage
  misc_feature 1..23: note = RM108981
tgccatacnntgccaccagggcg

SEQ ID NO: 207 - DNA, 32 bp, synthetic construct; identical to SEQ ID NO: 186
  source 1..32: mol_type = other DNA
  misc_feature 25..26: note = DNA
  misc_feature order(1..24,27..32): note = RNA
  modified_base 24: mod_base = OTHER; note = 2-Prime-O-Methoxyethyl modified 5-methyl Cytidine
  modified_base 25: mod_base = OTHER; note = DNA nucleotide carrying a 6-amino-5-nitro-3-yl-2(1H)-pyridone nucleobase
  modified_base 26: mod_base = OTHER; note = DNA nucleotide carrying a hypoxanthine nucleobase
  modified_base order(19,21,23,28,30,32): mod_base = OTHER; note = 2-Prime-Fluoro modified nucleoside
  modified_base order(1..18,20,22,27,29,31): mod_base = OTHER; note = 2-Prime-O-Methyl modified nucleoside
  modified_base order(1^2,31^32): mod_base = OTHER; note = (1,3-dimethylimidazolidin-2-ylidene) Phosphoramidate linkage
  modified_base order(2..26,27..31): mod_base = OTHER; note = Phosphorothioate linkage
  modified_base 26^27: mod_base = OTHER; note = Methylphosphonate linkage
  misc_feature 1..32: note = RM108982

SEQ ID NO: 208 - DNA, 32 bp, synthetic construct; identical to SEQ ID NO: 187
  source 1..32: mol_type = other DNA
  misc_feature 22..23: note = DNA
  misc_feature order(1..21,24..32): note = RNA
  modified_base 21: mod_base = OTHER; note = 2-Prime-O-Methoxyethyl modified 5-methyl Cytidine
  modified_base 22: mod_base = OTHER; note = DNA nucleotide carrying a 6-amino-5-nitro-3-yl-2(1H)-pyridone nucleobase
  modified_base 23: mod_base = OTHER; note = DNA nucleotide carrying a hypoxanthine nucleobase
  modified_base order(16,18,20,25,27,29): mod_base = OTHER; note = 2-Prime-Fluoro modified nucleoside
  modified_base order(1..15,17,19,24,26,28,30..32): mod_base = OTHER; note = 2-Prime-O-Methyl modified nucleoside
  modified_base order(1^2,31^32): mod_base = OTHER; note = (1,3-dimethylimidazolidin-2-ylidene) Phosphoramidate linkage
  modified_base order(2..23,24..31): mod_base = OTHER; note = Phosphorothioate linkage
  modified_base 23^24: mod_base = OTHER; note = Methylphosphonate linkage
  misc_feature 1..32: note = RM108983

SEQ ID NO: 209 - DNA, 32 bp, synthetic construct; identical to SEQ ID NO: 5
  source 1..32: mol_type = other DNA
  misc_feature 19..20: note = DNA
  misc_feature order(1..18,21..32): note = RNA
  modified_base 18: mod_base = OTHER; note = 2-Prime-O-Methoxyethyl modified 5-methyl Cytidine
  modified_base 19: mod_base = OTHER; note = DNA nucleotide carrying a 6-amino-5-nitro-3-yl-2(1H)-pyridone nucleobase
  modified_base 20: mod_base = OTHER; note = DNA nucleotide carrying a hypoxanthine nucleobase
  modified_base order(13,15,17,22,24,26): mod_base = OTHER; note = 2-Prime-Fluoro modified nucleoside
  modified_base order(1..12,14,16,21,23,25,27..32): mod_base = OTHER; note = 2-Prime-O-Methyl modified nucleoside
  modified_base order(1^2,31^32): mod_base = OTHER; note = (1,3-dimethylimidazolidin-2-ylidene) Phosphoramidate linkage
  modified_base order(2..20,21..31): mod_base = OTHER; note = Phosphorothioate linkage
  modified_base 20^21: mod_base = OTHER; note = Methylphosphonate linkage
  misc_feature 1..32: note = RM108984

SEQ ID NO: 210 - DNA, 32 bp, synthetic construct; identical to SEQ ID NO: 189
  source 1..32: mol_type = other DNA
  misc_feature 16..17: note = DNA
  misc_feature order(1..15,18..32): note = RNA
  modified_base 15: mod_base = OTHER; note = 2-Prime-O-Methoxyethyl modified 5-methyl Cytidine
  modified_base 16: mod_base = OTHER; note = DNA nucleotide carrying a 6-amino-5-nitro-3-yl-2(1H)-pyridone nucleobase
  modified_base 17: mod_base = OTHER; note = DNA nucleotide carrying a hypoxanthine nucleobase
  modified_base order(10,12,14,19,21,23): mod_base = OTHER; note = 2-Prime-Fluoro modified nucleoside
  modified_base order(1..9,11,13,18,20,22,24..32): mod_base = OTHER; note = 2-Prime-O-Methyl modified nucleoside
  modified_base order(1^2,31^32): mod_base = OTHER; note = (1,3-dimethylimidazolidin-2-ylidene) Phosphoramidate linkage
  modified_base order(2..17,18..31): mod_base = OTHER; note = Phosphorothioate linkage
  modified_base 17^18: mod_base = OTHER; note = Methylphosphonate linkage
  misc_feature 1..32: note = RM108985

SEQ ID NO: 211 - DNA, 32 bp, synthetic construct; identical to SEQ ID NO: 190
  source 1..32: mol_type = other DNA
  misc_feature 13..14: note = DNA
  misc_feature order(1..12,15..32): note = RNA
  modified_base 12: mod_base = OTHER; note = 2-Prime-O-Methoxyethyl modified 5-methyl Cytidine
  modified_base 13: mod_base = OTHER; note = DNA nucleotide carrying a 6-amino-5-nitro-3-yl-2(1H)-pyridone nucleobase
  modified_base 14: mod_base = OTHER; note = DNA nucleotide carrying a hypoxanthine nucleobase
  modified_base order(7,9,11,16,18,20): mod_base = OTHER; note = 2-Prime-Fluoro modified nucleoside
  modified_base order(1..6,8,10,15,17,19,21..32): mod_base = OTHER; note = 2-Prime-O-Methyl modified nucleoside
  modified_base order(1^2,31^32): mod_base = OTHER; note = (1,3-dimethylimidazolidin-2-ylidene) Phosphoramidate linkage
  modified_base order(2..14,15..31): mod_base = OTHER; note = Phosphorothioate linkage
  modified_base 14^15: mod_base = OTHER; note = Methylphosphonate linkage
  misc_feature 1..32: note = RM108986

SEQ ID NO: 212 - DNA, 32 bp, synthetic construct; identical to SEQ ID NO: 191
  source 1..32: mol_type = other DNA
  misc_feature 10..11: note = DNA
  misc_feature order(1..9,12..32): note = RNA
  modified_base 9: mod_base = OTHER; note = 2-Prime-O-Methoxyethyl modified 5-methyl Cytidine
  modified_base 10: mod_base = OTHER; note = DNA nucleotide carrying a 6-amino-5-nitro-3-yl-2(1H)-pyridone nucleobase
  modified_base 11: mod_base = OTHER; note = DNA nucleotide carrying a hypoxanthine nucleobase
  modified_base order(4,6,8,13,15,17): mod_base = OTHER; note = 2-Prime-Fluoro modified nucleoside
  modified_base order(1..3,5,7,12,14,16,18..32): mod_base = OTHER; note = 2-Prime-O-Methyl modified nucleoside
  modified_base order(1^2,31^32): mod_base = OTHER; note = (1,3-dimethylimidazolidin-2-ylidene) Phosphoramidate linkage
  modified_base order(2..11,12..31): mod_base = OTHER; note = Phosphorothioate linkage
  modified_base 11^12: mod_base = OTHER; note = Methylphosphonate linkage
  misc_feature 1..32: note = RM108987

SEQ ID NO: 213 - DNA, 32 bp, synthetic construct; identical to SEQ ID NO: 192
  source 1..32: mol_type = other DNA
  misc_feature 7..8: note = DNA
  misc_feature order(1..6,9..32): note = RNA
  modified_base 6: mod_base = OTHER; note = 2-Prime-O-Methoxyethyl modified 5-methyl Cytidine
  modified_base 7: mod_base = OTHER; note = DNA nucleotide carrying a 6-amino-5-nitro-3-yl-2(1H)-pyridone nucleobase
  modified_base 8: mod_base = OTHER; note = DNA nucleotide carrying a hypoxanthine nucleobase
  modified_base order(1,3,5,10,12,14): mod_base = OTHER; note = 2-Prime-Fluoro modified nucleoside
  modified_base order(2,4,9,11,13,15..32): mod_base = OTHER; note = 2-Prime-O-Methyl modified nucleoside
  modified_base order(1^2,31^32): mod_base = OTHER; note = (1,3-dimethylimidazolidin-2-ylidene) Phosphoramidate linkage
  modified_base order(2..8,9..31): mod_base = OTHER; note = Phosphorothioate linkage
  modified_base 8^9: mod_base = OTHER; note = Methylphosphonate linkage
  misc_feature 1..32: note = RM108988

SEQ ID NO: 214 - DNA, 26 bp, synthetic construct
  source 1..26: mol_type = other DNA
  misc_feature 16..17: note = DNA
  misc_feature order(1..15,18..26): note = RNA
  modified_base 15: mod_base = OTHER; note = 2-Prime-O-Methoxyethyl modified 5-methyl Cytidine
  modified_base 16: mod_base = OTHER; note = DNA nucleotide carrying a 6-amino-5-nitro-3-yl-2(1H)-pyridone nucleobase
  modified_base 17: mod_base = OTHER; note = DNA nucleotide carrying a hypoxanthine nucleobase
  modified_base order(9,11,13,19,21,23,25): mod_base = OTHER; note = 2-Prime-Fluoro modified nucleoside
  modified_base order(1..8,10,12,14,18,20,22,24,26): mod_base = OTHER; note = 2-Prime-O-Methyl modified nucleoside
  modified_base order(1^2,25^26): mod_base = OTHER; note = (1,3-dimethylimidazolidin-2-ylidene) Phosphoramidate linkage
  modified_base order(2..17,18..25): mod_base = OTHER; note = Phosphorothioate linkage
  modified_base 17^18: mod_base = OTHER; note = Methylphosphonate linkage
  misc_feature 1..26: note = RM108989
ggcatgatgccatacnntgccaccag

SEQ ID NO: 215 - DNA, 26 bp, synthetic construct
  source 1..26: mol_type = other DNA
  misc_feature 13..14: note = DNA
  misc_feature order(1..12,15..26): note = RNA
  modified_base 12: mod_base = OTHER; note = 2-Prime-O-Methoxyethyl modified 5-methyl Cytidine
  modified_base 13: mod_base = OTHER; note = DNA nucleotide carrying a 6-amino-5-nitro-3-yl-2(1H)-pyridone nucleobase
  modified_base 14: mod_base = OTHER; note = DNA nucleotide carrying a hypoxanthine nucleobase
  modified_base order(6,8,10,16,18,20,22): mod_base = OTHER; note = 2-Prime-Fluoro modified nucleoside
  modified_base order(1..5,7,9,11,15,17,19,21,23..26): mod_base = OTHER; note = 2-Prime-O-Methyl modified nucleoside
  modified_base order(1^2,25^26): mod_base = OTHER; note = (1,3-dimethylimidazolidin-2-ylidene) Phosphoramidate linkage
  modified_base order(2..14,15..25): mod_base = OTHER; note = Phosphorothioate linkage
  modified_base 14^15: mod_base = OTHER; note = Methylphosphonate linkage
  misc_feature 1..26: note = RM108990
atgatgccatacnntgccaccagggc

SEQ ID NO: 216 - DNA, 26 bp, synthetic construct
  source 1..26: mol_type = other DNA
  misc_feature 10..11: note = DNA
  misc_feature order(1..9,12..26): note = RNA
  modified_base 9: mod_base = OTHER; note = 2-Prime-O-Methoxyethyl modified 5-methyl Cytidine
  modified_base 10: mod_base = OTHER; note = DNA nucleotide carrying a 6-amino-5-nitro-3-yl-2(1H)-pyridone nucleobase
  modified_base 11: mod_base = OTHER; note = DNA nucleotide carrying a hypoxanthine nucleobase
  modified_base order(3,5,7,13,15,17,19): mod_base = OTHER; note = 2-Prime-Fluoro modified nucleoside
  modified_base order(1..2,4,6,8,12,14,16,18,20..26): mod_base = OTHER; note = 2-Prime-O-Methyl modified nucleoside
  modified_base order(1^2,25^26): mod_base = OTHER; note = (1,3-dimethylimidazolidin-2-ylidene) Phosphoramidate linkage
  modified_base order(2..11,12..25): mod_base = OTHER; note = Phosphorothioate linkage
  modified_base 11^12: mod_base = OTHER; note = Methylphosphonate linkage
  misc_feature 1..26: note = RM108991
atgccatacnntgccaccagggcgat

SEQ ID NO: 217 - DNA, 32 bp, synthetic construct; identical to SEQ ID NO: 185
  source 1..32: mol_type = other DNA
  misc_feature 28..29: note = DNA
  misc_feature order(1..27,30..32): note = RNA
  modified_base 27: mod_base = OTHER; note = 2-Prime-O-Methoxyethyl modified 5-methyl Cytidine
  modified_base 28: mod_base = OTHER; note = DNA nucleotide carrying a 6-amino-5-nitro-3-yl-2(1H)-pyridone nucleobase
  modified_base 29: mod_base = OTHER; note = DNA nucleotide carrying a hypoxanthine nucleobase
  modified_base order(10..12,17..18,22..23,26,31): mod_base = OTHER; note = 2-Prime-Fluoro modified nucleoside
  modified_base order(1..9,13..16,19..21,24..25,30,32): mod_base = OTHER; note = 2-Prime-O-Methyl modified nucleoside
  modified_base order(1^2,31^32): mod_base = OTHER; note = (1,3-dimethylimidazolidin-2-ylidene) Phosphoramidate linkage
  modified_base order(2..29,30^31): mod_base = OTHER; note = Phosphorothioate linkage
  modified_base 29^30: mod_base = OTHER; note = Methylphosphonate linkage
  misc_feature 1..32: note = RM108992

SEQ ID NO: 218 - DNA, 32 bp, synthetic construct; identical to SEQ ID NO: 186
  source 1..32: mol_type = other DNA
  misc_feature 25..26: note = DNA
  misc_feature order(1..24,27..32): note = RNA
  modified_base 24: mod_base = OTHER; note = 2-Prime-O-Methoxyethyl modified 5-methyl Cytidine
  modified_base 25: mod_base = OTHER; note = DNA nucleotide carrying a 6-amino-5-nitro-3-yl-2(1H)-pyridone nucleobase
  modified_base 26: mod_base = OTHER; note = DNA nucleotide carrying a hypoxanthine nucleobase
  modified_base order(7..9,14..15,19..20,23,28): mod_base = OTHER; note = 2-Prime-Fluoro modified nucleoside
  modified_base order(1..6,10..13,16..18,21..22,27,29..32): mod_base = OTHER; note = 2-Prime-O-Methyl modified nucleoside
  modified_base order(1^2,31^32): mod_base = OTHER; note = (1,3-dimethylimidazolidin-2-ylidene) Phosphoramidate linkage
  modified_base order(2..26,27..31): mod_base = OTHER; note = Phosphorothioate linkage
  modified_base 26^27: mod_base = OTHER; note = Methylphosphonate linkage
  misc_feature 1..32: note = RM108993

SEQ ID NO: 219 - DNA, 32 bp, synthetic construct; identical to SEQ ID NO: 187
  source 1..32: mol_type = other DNA
  misc_feature 22..23: note = DNA
  misc_feature order(1..21,24..32): note = RNA
  modified_base 21: mod_base = OTHER; note = 2-Prime-O-Methoxyethyl modified 5-methyl Cytidine
  modified_base 22: mod_base = OTHER; note = DNA nucleotide carrying a 6-amino-5-nitro-3-yl-2(1H)-pyridone nucleobase
  modified_base 23: mod_base = OTHER; note = DNA nucleotide carrying a hypoxanthine nucleobase
  modified_base order(4..6,11..12,16..17,20,25): mod_base = OTHER; note = 2-Prime-Fluoro modified nucleoside
  modified_base order(1..3,7..10,13..15,18..19,24,26..32): mod_base = OTHER; note = 2-Prime-O-Methyl modified nucleoside
  modified_base order(1^2,31^32): mod_base = OTHER; note = (1,3-dimethylimidazolidin-2-ylidene) Phosphoramidate linkage
  modified_base order(2..23,24..31): mod_base = OTHER; note = Phosphorothioate linkage
  modified_base 23^24: mod_base = OTHER; note = Methylphosphonate linkage
  misc_feature 1..32: note = RM108994

SEQ ID NO: 220 - DNA, 32 bp, synthetic construct; identical to SEQ ID NO: 5
  source 1..32: mol_type = other DNA
  misc_feature 19..20: note = DNA
  misc_feature order(1..18,21..32): note = RNA
  modified_base 18: mod_base = OTHER; note = 2-Prime-O-Methoxyethyl modified 5-methyl Cytidine
  modified_base 19: mod_base = OTHER; note = DNA nucleotide carrying a 6-amino-5-nitro-3-yl-2(1H)-pyridone nucleobase
  modified_base 20: mod_base = OTHER; note = DNA nucleotide carrying a hypoxanthine nucleobase
  modified_base order(1..3,8..9,13..14,17,22): mod_base = OTHER; note = 2-Prime-Fluoro modified nucleoside
  modified_base order(4..7,10..12,15..16,21,23..32): mod_base = OTHER; note = 2-Prime-O-Methyl modified nucleoside
  modified_base order(1^2,31^32): mod_base = OTHER; note = (1,3-dimethylimidazolidin-2-ylidene) Phosphoramidate linkage
  modified_base order(2..20,21..31): mod_base = OTHER; note = Phosphorothioate linkage
  modified_base 20^21: mod_base = OTHER; note = Methylphosphonate linkage
  misc_feature 1..32: note = RM108995

SEQ ID NO: 221 - DNA, 26 bp, synthetic construct
  source 1..26: mol_type = other DNA
  misc_feature 13..14: note = DNA
  misc_feature order(1..12,15..26): note = RNA
  modified_base 12: mod_base = OTHER; note = 2-Prime-O-Methoxyethyl modified 5-methyl Cytidine
  modified_base 13: mod_base = OTHER; note = DNA nucleotide carrying a 6-amino-5-nitro-3-yl-2(1H)-pyridone nucleobase
  modified_base 14: mod_base = OTHER; note = DNA nucleotide carrying a hypoxanthine nucleobase
  modified_base order(2,4,6,16,22,24,26): mod_base = OTHER; note = 2-Prime-Fluoro modified nucleoside
  modified_base order(1,3,5,7..11,15,17..21,23,25): mod_base = OTHER; note = 2-Prime-O-Methyl modified nucleoside
  modified_base order(1^2,25^26): mod_base = OTHER; note = (1,3-dimethylimidazolidin-2-ylidene) Phosphoramidate linkage
  modified_base order(2..14,15..25): mod_base = OTHER; note = Phosphorothioate linkage
  modified_base 14^15: mod_base = OTHER; note = Methylphosphonate linkage
  misc_feature 1..26: note = RM108996
atgatgccatacnntgccaccagggc

SEQ ID NO: 222 - DNA, 29 bp, synthetic construct
  source 1..29: mol_type = other DNA
  misc_feature 18..19: note = DNA
  misc_feature order(1..17,20..29): note = RNA
  modified_base 17: mod_base = OTHER; note = 2-Prime-O-Methoxyethyl modified 5-methyl Cytidine
  modified_base 18: mod_base = OTHER; note = DNA nucleotide carrying a 6-amino-5-nitro-3-yl-2(1H)-pyridone nucleobase
  modified_base 19: mod_base = OTHER; note = DNA nucleotide carrying a hypoxanthine nucleobase
  modified_base order(8,11,14..15,21,26..28): mod_base = OTHER; note = 2-Prime-Fluoro modified nucleoside
  modified_base order(1..7,9..10,12..13,16,20,22..25,29): mod_base = OTHER; note = 2-Prime-O-Methyl modified nucleoside
  modified_base order(1^2,28^29): mod_base = OTHER; note = (1,3-dimethylimidazolidin-2-ylidene) Phosphoramidate linkage
  modified_base order(2..19,20..28): mod_base = OTHER; note = Phosphorothioate linkage
  modified_base 19^20: mod_base = OTHER; note = Methylphosphonate linkage
  misc_feature 1..29: note = RM108997
ggggcatgatgccatacnntgccaccagg

SEQ ID NO: 223 - DNA, 29 bp, synthetic construct
  source 1..29: mol_type = other DNA
  misc_feature 15..16: note = DNA
  misc_feature order(1..14,17..29): note = RNA
  modified_base 14: mod_base = OTHER; note = 2-Prime-O-Methoxyethyl modified 5-methyl Cytidine
  modified_base 15: mod_base = OTHER; note = DNA nucleotide carrying a 6-amino-5-nitro-3-yl-2(1H)-pyridone nucleobase
  modified_base 16: mod_base = OTHER; note = DNA nucleotide carrying a hypoxanthine nucleobase
  modified_base order(5,8,11..12,18,23..25): mod_base = OTHER; note = 2-Prime-Fluoro modified nucleoside
  modified_base order(1..4,6..7,9..10,13,17,19..22,26..29): mod_base = OTHER; note = 2-Prime-O-Methyl modified nucleoside
  modified_base order(1^2,28^29): mod_base = OTHER; note = (1,3-dimethylimidazolidin-2-ylidene) Phosphoramidate linkage
  modified_base order(2..16,17..28): mod_base = OTHER; note = Phosphorothioate linkage
  modified_base 16^17: mod_base = OTHER; note = Methylphosphonate linkage
  misc_feature 1..29: note = RM108998
gcatgatgccatacnntgccaccagggcg

SEQ ID NO: 224 - DNA, 29 bp, synthetic construct
  source 1..29: mol_type = other DNA
  misc_feature 12..13: note = DNA
  misc_feature order(1..11,14..29): note = RNA
  modified_base 11: mod_base = OTHER; note = 2-Prime-O-Methoxyethyl modified 5-methyl Cytidine
  modified_base 12: mod_base = OTHER; note = DNA nucleotide carrying a 6-amino-5-nitro-3-yl-2(1H)-pyridone nucleobase
  modified_base 13: mod_base = OTHER; note = DNA nucleotide carrying a hypoxanthine nucleobase
  modified_base order(2,5,8..9,15,20..22): mod_base = OTHER; note = 2-Prime-Fluoro modified nucleoside
  modified_base order(1,3..4,6..7,10,14,16..19,23..29): mod_base = OTHER; note = 2-Prime-O-Methyl modified nucleoside
  modified_base order(1^2,28^29): mod_base = OTHER; note = (1,3-dimethylimidazolidin-2-ylidene) Phosphoramidate linkage
  modified_base order(2..13,14..28): mod_base = OTHER; note = Phosphorothioate linkage
  modified_base 13^14: mod_base = OTHER; note = Methylphosphonate linkage
  misc_feature 1..29: note = RM108999
tgatgccatacnntgccaccagggcgatg

SEQ ID NO: 225 - DNA, 26 bp, synthetic construct
  source 1..26: mol_type = other DNA
  misc_feature 19..20: note = DNA
  misc_feature order(1..18,21..26): note = RNA
  modified_base 18: mod_base = OTHER; note = 2-Prime-O-Methoxyethyl modified 5-methyl Cytidine
  modified_base 19: mod_base = OTHER; note = DNA nucleotide carrying a 6-amino-5-nitro-3-yl-2(1H)-pyridone nucleobase
  modified_base 20: mod_base = OTHER; note = DNA nucleotide carrying a hypoxanthine nucleobase
  modified_base order(5,9,11,13,16,22,25): mod_base = OTHER; note = 2-Prime-Fluoro modified nucleoside
  modified_base order(1..4,6..8,10,12,14..15,17,21,23..24,26): mod_base = OTHER; note = 2-Prime-O-Methyl modified nucleoside
  modified_base order(1^2,25^26): mod_base = OTHER; note = (1,3-dimethylimidazolidin-2-ylidene) Phosphoramidate linkage
  modified_base order(2..20,21..25): mod_base = OTHER; note = Phosphorothioate linkage
  modified_base 20^21: mod_base = OTHER; note = Methylphosphonate linkage
  misc_feature 1..26: note = RM109000
aggggcatgatgccatacnntgccac

SEQ ID NO: 226 - DNA, 26 bp, synthetic construct
  source 1..26: mol_type = other DNA
  misc_feature 16..17: note = DNA
  misc_feature order(1..15,18..26): note = RNA
  modified_base 15: mod_base = OTHER; note = 2-Prime-O-Methoxyethyl modified 5-methyl Cytidine
  modified_base 16: mod_base = OTHER; note = DNA nucleotide carrying a 6-amino-5-nitro-3-yl-2(1H)-pyridone nucleobase
  modified_base 17: mod_base = OTHER; note = DNA nucleotide carrying a hypoxanthine nucleobase
  modified_base order(2,6,8,10,13,19,22): mod_base = OTHER; note = 2-Prime-Fluoro modified nucleoside
  modified_base order(1,3..5,7,9,11..12,14,18,20..21,23..26): mod_base = OTHER; note = 2-Prime-O-Methyl modified nucleoside
  modified_base order(1^2,25^26): mod_base = OTHER; note = (1,3-dimethylimidazolidin-2-ylidene) Phosphoramidate linkage
  modified_base order(2..17,18..25): mod_base = OTHER; note = Phosphorothioate linkage
  modified_base 17^18: mod_base = OTHER; note = Methylphosphonate linkage
  misc_feature 1..26: note = RM109001
ggcatgatgccatacnntgccaccag

SEQ ID NO: 227 - DNA, 26 bp, synthetic construct
  source 1..26: mol_type = other DNA
  misc_feature 10..11: note = DNA
  misc_feature order(1..9,12..26): note = RNA
  modified_base 9: mod_base = OTHER; note = 2-Prime-O-Methoxyethyl modified 5-methyl Cytidine
  modified_base 10: mod_base = OTHER; note = DNA nucleotide carrying a 6-amino-5-nitro-3-yl-2(1H)-pyridone nucleobase
  modified_base 11: mod_base = OTHER; note = DNA nucleotide carrying a hypoxanthine nucleobase
  modified_base order(6,13,15,18,20,22,26): mod_base = OTHER; note = 2-Prime-Fluoro modified nucleoside
  modified_base order(1..5,7..8,12,14,16..17,19,21,23..25): mod_base = OTHER; note = 2-Prime-O-Methyl modified nucleoside
  modified_base order(1^2,25^26): mod_base = OTHER; note = (1,3-dimethylimidazolidin-2-ylidene) Phosphoramidate linkage
  modified_base order(2..11,12..25): mod_base = OTHER; note = Phosphorothioate linkage
  modified_base 11^12: mod_base = OTHER; note = Methylphosphonate linkage
  misc_feature 1..26: note = RM109002
atgccatacnntgccaccagggcgat

SEQ ID NO: 228 - DNA, 26 bp, synthetic construct
  source 1..26: mol_type = other DNA
  misc_feature 7..8: note = DNA
  misc_feature order(1..6,9..26): note = RNA
  modified_base 6: mod_base = OTHER; note = 2-Prime-O-Methoxyethyl modified 5-methyl Cytidine
  modified_base 7: mod_base = OTHER; note = DNA nucleotide carrying a 6-amino-5-nitro-3-yl-2(1H)-pyridone nucleobase
  modified_base 8: mod_base = OTHER; note = DNA nucleotide carrying a hypoxanthine nucleobase
  modified_base order(3,10,12,15,17,19,23): mod_base = OTHER; note = 2-Prime-Fluoro modified nucleoside
  modified_base order(1..2,4..5,9,11,13..14,16,18,20..22,24..26): mod_base = OTHER; note = 2-Prime-O-Methyl modified nucleoside
  modified_base order(1^2,25^26): mod_base = OTHER; note = (1,3-dimethylimidazolidin-2-ylidene) Phosphoramidate linkage
  modified_base order(2..8,9..25): mod_base = OTHER; note = Phosphorothioate linkage
  modified_base 8^9: mod_base = OTHER; note = Methylphosphonate linkage
  misc_feature 1..26: note = RM109003
ccatacnntgccaccagggcgatggc

SEQ ID NO: 229 - DNA, 26 bp, synthetic construct
  source 1..26: mol_type = other DNA
  misc_feature 19..20: note = DNA
  misc_feature order(1..18,21..26): note = RNA
  modified_base 18: mod_base = OTHER; note = 2-Prime-O-Methoxyethyl modified 5-methyl Cytidine
  modified_base 19: mod_base = OTHER; note = DNA nucleotide carrying a 6-amino-5-nitro-3-yl-2(1H)-pyridone nucleobase
  modified_base 20: mod_base = OTHER; note = DNA nucleotide carrying a hypoxanthine nucleobase
  modified_base order(11,13,16,22,25): mod_base = OTHER; note = 2-Prime-Fluoro modified nucleoside
  modified_base order(1..10,12,14..15,17,21,23..24,26): mod_base = OTHER; note = 2-Prime-O-Methyl modified nucleoside
  modified_base order(1^2,25^26): mod_base = OTHER; note = (1,3-dimethylimidazolidin-2-ylidene) Phosphoramidate linkage
  modified_base order(2..20,21..25): mod_base = OTHER; note = Phosphorothioate linkage
  modified_base 20^21: mod_base = OTHER; note = Methylphosphonate linkage
  misc_feature 1..26: note = RM109004
aggggcatgatgccatacnntgccac

SEQ ID NO: 230 - DNA, 26 bp, synthetic construct
  source 1..26: mol_type = other DNA
  misc_feature 16..17: note = DNA
  misc_feature order(1..15,18..26): note = RNA
  modified_base 15: mod_base = OTHER; note = 2-Prime-O-Methoxyethyl modified 5-methyl Cytidine
  modified_base 16: mod_base = OTHER; note = DNA nucleotide carrying a 6-amino-5-nitro-3-yl-2(1H)-pyridone nucleobase
  modified_base 17: mod_base = OTHER; note = DNA nucleotide carrying a hypoxanthine nucleobase
  modified_base order(8,10,13,19,22): mod_base = OTHER; note = 2-Prime-Fluoro modified nucleoside
  modified_base order(1..7,9,11..12,14,18,20..21,23..26): mod_base = OTHER; note = 2-Prime-O-Methyl modified nucleoside
  modified_base order(1^2,25^26): mod_base = OTHER; note = (1,3-dimethylimidazolidin-2-ylidene) Phosphoramidate linkage
  modified_base order(2..17,18..25): mod_base = OTHER; note = Phosphorothioate linkage
  modified_base 17^18: mod_base = OTHER; note = Methylphosphonate linkage
  misc_feature 1..26: note = RM109005
ggcatgatgccatacnntgccaccag

SEQ ID NO: 231 - DNA, 26 bp, synthetic construct
  source 1..26: mol_type = other DNA
  misc_feature 13..14: note = DNA
  misc_feature order(1..12,15..26): note = RNA
  modified_base 12: mod_base = OTHER; note = 2-Prime-O-Methoxyethyl modified 5-methyl Cytidine
  modified_base 13: mod_base = OTHER; note = DNA nucleotide carrying a 6-amino-5-nitro-3-yl-2(1H)-pyridone nucleobase
  modified_base 14: mod_base = OTHER; note = DNA nucleotide carrying a hypoxanthine nucleobase
  modified_base order(5,7,10,16,19): mod_base = OTHER; note = 2-Prime-Fluoro modified nucleoside
  modified_base order(1..4,6,8..9,11,15,17..18,20..26): mod_base = OTHER; note = 2-Prime-O-Methyl modified nucleoside
  modified_base order(1^2,25^26): mod_base = OTHER; note = (1,3-dimethylimidazolidin-2-ylidene) Phosphoramidate linkage
  modified_base order(2..14,15..25): mod_base = OTHER; note = Phosphorothioate linkage
  modified_base 14^15: mod_base = OTHER; note = Methylphosphonate linkage
  misc_feature 1..26: note = RM109006
atgatgccatacnntgccaccagggc

SEQ ID NO: 232 - DNA, 26 bp, synthetic construct
  source 1..26: mol_type = other DNA
  misc_feature 10..11: note = DNA
  misc_feature order(1..9,12..26): note = RNA
  modified_base 9: mod_base = OTHER; note = 2-Prime-O-Methoxyethyl modified 5-methyl Cytidine
  modified_base 10: mod_base = OTHER; note = DNA nucleotide carrying a 6-amino-5-nitro-3-yl-2(1H)-pyridone nucleobase
  modified_base 11: mod_base = OTHER; note = DNA nucleotide carrying a hypoxanthine nucleobase
  modified_base order(2,4,7,13,16): mod_base = OTHER; note = 2-Prime-Fluoro modified nucleoside
  modified_base order(1,3,5..6,8,12,14..15,17..26): mod_base = OTHER; note = 2-Prime-O-Methyl modified nucleoside
  modified_base order(1^2,25^26): mod_base = OTHER; note = (1,3-dimethylimidazolidin-2-ylidene) Phosphoramidate linkage
  modified_base order(2..11,12..25): mod_base = OTHER; note = Phosphorothioate linkage
  modified_base 11^12: mod_base = OTHER; note = Methylphosphonate linkage
  misc_feature 1..26: note = RM109007
atgccatacnntgccaccagggcgat

SEQ ID NO: 233 - DNA, 29 bp, synthetic construct
  source 1..29: mol_type = other DNA
  misc_feature 21..22: note = DNA
  misc_feature order(1..20,23..29): note = RNA
  modified_base 20: mod_base = OTHER; note = 2-Prime-O-Methoxyethyl modified 5-methyl Cytidine
  modified_base 21: mod_base = OTHER; note = DNA nucleotide carrying a 6-amino-5-nitro-3-yl-2(1H)-pyridone nucleobase
  modified_base 22: mod_base = OTHER; note = DNA nucleotide carrying a hypoxanthine nucleobase
  modified_base order(13,15,18,24,27): mod_base = OTHER; note = 2-Prime-Fluoro modified nucleoside
  modified_base order(1..12,14,16..17,19,23,25..26,28..29): mod_base = OTHER; note = 2-Prime-O-Methyl modified nucleoside
  modified_base order(1^2,28^29): mod_base = OTHER; note = (1,3-dimethylimidazolidin-2-ylidene) Phosphoramidate linkage
  modified_base order(2..22,23..28): mod_base = OTHER; note = Phosphorothioate linkage
  modified_base 22^23: mod_base = OTHER; note = Methylphosphonate linkage
  misc_feature 1..29: note = RM109008
tgaggggcatgatgccatacnntgccacc

SEQ ID NO: 234 - DNA, 29 bp, synthetic construct
  source 1..29: mol_type = other DNA
  misc_feature 18..19: note = DNA
  misc_feature order(1..17,20..29): note = RNA
  modified_base 17: mod_base = OTHER; note = 2-Prime-O-Methoxyethyl modified 5-methyl Cytidine
  modified_base 18: mod_base = OTHER; note = DNA nucleotide carrying a 6-amino-5-nitro-3-yl-2(1H)-pyridone nucleobase
  modified_base 19: mod_base = OTHER; note = DNA nucleotide carrying a hypoxanthine nucleobase
  modified_base order(10,12,15,21,24): mod_base = OTHER; note = 2-Prime-Fluoro modified nucleoside
  modified_base order(1..9,11,13..14,16,20,22..23,25..29): mod_base = OTHER; note = 2-Prime-O-Methyl modified nucleoside
  modified_base order(1^2,28^29): mod_base = OTHER; note = (1,3-dimethylimidazolidin-2-ylidene) Phosphoramidate linkage
  modified_base order(2..19,20..28): mod_base = OTHER; note = Phosphorothioate linkage
  modified_base 19^20: mod_base = OTHER; note = Methylphosphonate linkage
  misc_feature 1..29: note = RM109009
ggggcatgatgccatacnntgccaccagg

SEQ ID NO: 235 - DNA, 29 bp, synthetic construct
  source 1..29: mol_type = other DNA
  misc_feature 15..16: note = DNA
  misc_feature order(1..14,17..29): note = RNA
  modified_base 14: mod_base = OTHER; note = 2-Prime-O-Methoxyethyl modified 5-methyl Cytidine
  modified_base 15: mod_base = OTHER; note = DNA nucleotide carrying a 6-amino-5-nitro-3-yl-2(1H)-pyridone nucleobase
  modified_base 16: mod_base = OTHER; note = DNA nucleotide carrying a hypoxanthine nucleobase
  modified_base order(7,9,12,18,21): mod_base = OTHER; note = 2-Prime-Fluoro modified nucleoside
  modified_base order(1..6,8,10..11,13,17,19..20,22..29): mod_base = OTHER; note = 2-Prime-O-Methyl modified nucleoside
  modified_base order(1^2,28^29): mod_base = OTHER; note = (1,3-dimethylimidazolidin-2-ylidene) Phosphoramidate linkage
  modified_base order(2..16,17..28): mod_base = OTHER; note = Phosphorothioate linkage
  modified_base 16^17: mod_base = OTHER; note = Methylphosphonate linkage
  misc_feature 1..29: note = RM109010
gcatgatgccatacnntgccaccagggcg

SEQ ID NO: 236 - DNA, 29 bp, synthetic construct
  source 1..29: mol_type = other DNA
  misc_feature 12..13: note = DNA
  misc_feature order(1..11,14..29): note = RNA
  modified_base 11: mod_base = OTHER; note = 2-Prime-O-Methoxyethyl modified 5-methyl Cytidine
  modified_base 12: mod_base = OTHER; note = DNA nucleotide carrying a 6-amino-5-nitro-3-yl-2(1H)-pyridone nucleobase
  modified_base 13: mod_base = OTHER; note = DNA nucleotide carrying a hypoxanthine nucleobase
  modified_base order(4,6,9,15,18): mod_base = OTHER; note = 2-Prime-Fluoro modified nucleoside
  modified_base order(1..3,5,7..8,10,14,16..17,19..29): mod_base = OTHER; note = 2-Prime-O-Methyl modified nucleoside
  modified_base order(1^2,28^29): mod_base = OTHER; note = (1,3-dimethylimidazolidin-2-ylidene) Phosphoramidate linkage
  modified_base order(2..13,14..28): mod_base = OTHER; note = Phosphorothioate linkage
  modified_base 13^14: mod_base = OTHER; note = Methylphosphonate linkage
  misc_feature 1..29: note = RM109011
tgatgccatacnntgccaccagggcgatg

SEQ ID NO: 237 - DNA, 29 bp, synthetic construct
  source 1..29: mol_type = other DNA
  misc_feature 9..10: note = DNA
  misc_feature order(1..8,11..29): note = RNA
  modified_base 8: mod_base = OTHER; note = 2-Prime-O-Methoxyethyl modified 5-methyl Cytidine
  modified_base 9: mod_base = OTHER; note = DNA nucleotide carrying a 6-amino-5-nitro-3-yl-2(1H)-pyridone nucleobase
  modified_base 10: mod_base = OTHER; note = DNA nucleotide carrying a hypoxanthine nucleobase
  modified_base order(1,3,6,12,15): mod_base = OTHER; note = 2-Prime-Fluoro modified nucleoside
  modified_base order(2,4..5,7,11,13..14,16..29): mod_base = OTHER; note = 2-Prime-O-Methyl modified nucleoside
  modified_base order(1^2,28^29): mod_base = OTHER; note = (1,3-dimethylimidazolidin-2-ylidene) Phosphoramidate linkage
  modified_base order(2..10,11..28): mod_base = OTHER; note = Phosphorothioate linkage
  modified_base 10^11: mod_base = OTHER; note = Methylphosphonate linkage
  misc_feature 1..29: note = RM109012
tgccatacnntgccaccagggcgatggcc

SEQ ID NO: 238 - DNA, 26 bp, synthetic construct
  source 1..26: mol_type = other DNA
  misc_feature 16..17: note = DNA
  misc_feature order(1..15,18..26): note = RNA
  modified_base 15: mod_base = OTHER; note = 2-Prime-O-Methoxyethyl modified 5-methyl Cytidine
  modified_base 16: mod_base = OTHER; note = DNA nucleotide carrying a 6-amino-5-nitro-3-yl-2(1H)-pyridone nucleobase
  modified_base 17: mod_base = OTHER; note = DNA nucleotide carrying a hypoxanthine nucleobase
  modified_base order(12,19,21,24,26): mod_base = OTHER; note = 2-Prime-Fluoro modified nucleoside
  modified_base order(1..11,13..14,18,20,22..23,25): mod_base = OTHER; note = 2-Prime-O-Methyl modified nucleoside
  modified_base order(1^2,25^26): mod_base = OTHER; note = (1,3-dimethylimidazolidin-2-ylidene) Phosphoramidate linkage
  modified_base order(2..17,18..25): mod_base = OTHER; note = Phosphorothioate linkage
  modified_base 17^18: mod_base = OTHER; note = Methylphosphonate linkage
  misc_feature 1..26: note = RM109013
ggcatgatgccatacnntgccaccag

SEQ ID NO: 239 - DNA, 26 bp, synthetic construct
  source 1..26: mol_type = other DNA
  misc_feature 13..14: note = DNA
  misc_feature order(1..12,15..26): note = RNA
  modified_base 12: mod_base = OTHER; note = 2-Prime-O-Methoxyethyl modified 5-methyl Cytidine
  modified_base 13: mod_base = OTHER; note = DNA nucleotide carrying a 6-amino-5-nitro-3-yl-2(1H)-pyridone nucleobase
  modified_base 14: mod_base = OTHER; note = DNA nucleotide carrying a hypoxanthine nucleobase
  modified_base order(9,16,18,21,23): mod_base = OTHER; note = 2-Prime-Fluoro modified nucleoside
  modified_base order(1..8,10..11,15,17,19..20,22,24..26): mod_base = OTHER; note = 2-Prime-O-Methyl modified nucleoside
  modified_base order(1^2,25^26): mod_base = OTHER; note = (1,3-dimethylimidazolidin-2-ylidene) Phosphoramidate linkage
  modified_base order(2..14,15..25): mod_base = OTHER; note = Phosphorothioate linkage
  modified_base 14^15: mod_base = OTHER; note = Methylphosphonate linkage
  misc_feature 1..26: note = RM109014
atgatgccatacnntgccaccagggc

SEQ ID NO: 240 - DNA, 26 bp, synthetic construct
  source 1..26: mol_type = other DNA
  misc_feature 10..11: note = DNA
  misc_feature order(1..9,12..26): note = RNA
  modified_base 9: mod_base = OTHER; note = 2-Prime-O-Methoxyethyl modified 5-methyl Cytidine
  modified_base 10: mod_base = OTHER; note = DNA nucleotide carrying a 6-amino-5-nitro-3-yl-2(1H)-pyridone nucleobase
  modified_base 11: mod_base = OTHER; note = DNA nucleotide carrying a hypoxanthine nucleobase
  modified_base order(6,13,15,18,20): mod_base = OTHER; note = 2-Prime-Fluoro modified nucleoside
  modified_base order(1..5,7..8,12,14,16..17,19,21..26): mod_base = OTHER; note = 2-Prime-O-Methyl modified nucleoside
  modified_base order(1^2,25^26): mod_base = OTHER; note = (1,3-dimethylimidazolidin-2-ylidene) Phosphoramidate linkage
  modified_base order(2..11,12..25): mod_base = OTHER; note = Phosphorothioate linkage
  modified_base 11^12: mod_base = OTHER; note = Methylphosphonate linkage
  misc_feature 1..26: note = RM109015
atgccatacnntgccaccagggcgat

SEQ ID NO: 241 - DNA, 26 bp, synthetic construct
  source 1..26: mol_type = other DNA
  misc_feature 7..8: note = DNA
  misc_feature order(1..6,9..26): note = RNA
  modified_base 6: mod_base = OTHER; note = 2-Prime-O-Methoxyethyl modified 5-methyl Cytidine
  modified_base 7: mod_base = OTHER; note = DNA nucleotide carrying a 6-amino-5-nitro-3-yl-2(1H)-pyridone nucleobase
  modified_base 8: mod_base = OTHER; note = DNA nucleotide carrying a hypoxanthine nucleobase
  modified_base order(3,10,12,15,17): mod_base = OTHER; note = 2-Prime-Fluoro modified nucleoside
  modified_base order(1..2,4..5,9,11,13..14,16,18..26): mod_base = OTHER; note = 2-Prime-O-Methyl modified nucleoside
  modified_base order(1^2,25^26): mod_base = OTHER; note = (1,3-dimethylimidazolidin-2-ylidene) Phosphoramidate linkage
  modified_base order(2..8,9..25): mod_base = OTHER; note = Phosphorothioate linkage
  modified_base 8^9: mod_base = OTHER; note = Methylphosphonate linkage
  misc_feature 1..26: note = RM109016
ccatacnntgccaccagggcgatggc

SEQ ID NO: 242 - DNA, 29 bp, synthetic construct
  source 1..29: mol_type = other DNA
  misc_feature 18..19: note = DNA
  misc_feature order(1..17,20..29): note = RNA
  modified_base 17: mod_base = OTHER; note = 2-Prime-O-Methoxyethyl modified 5-methyl Cytidine
  modified_base 18: mod_base = OTHER; note = DNA nucleotide carrying a 6-amino-5-nitro-3-yl-2(1H)-pyridone nucleobase
  modified_base 19: mod_base = OTHER; note = DNA nucleotide carrying a hypoxanthine nucleobase
  modified_base order(14,21,23,26,28): mod_base = OTHER; note = 2-Prime-Fluoro modified nucleoside
  modified_base order(1..13,15..16,20,22,24..25,27,29): mod_base = OTHER; note = 2-Prime-O-Methyl modified nucleoside
  modified_base order(1^2,28^29): mod_base = OTHER; note = (1,3-dimethylimidazolidin-2-ylidene) Phosphoramidate linkage
  modified_base order(2..19,20..28): mod_base = OTHER; note = Phosphorothioate linkage
  modified_base 19^20: mod_base = OTHER; note = Methylphosphonate linkage
  misc_feature 1..29: note = RM109017
ggggcatgatgccatacnntgccaccagg

SEQ ID NO: 243 - DNA, 29 bp, synthetic construct
  source 1..29: mol_type = other DNA
  misc_feature 15..16: note = DNA
  misc_feature order(1..14,17..29): note = RNA
  modified_base 14: mod_base = OTHER; note = 2-Prime-O-Methoxyethyl modified 5-methyl Cytidine
  modified_base 15: mod_base = OTHER; note = DNA nucleotide carrying a 6-amino-5-nitro-3-yl-2(1H)-pyridone nucleobase
  modified_base 16: mod_base = OTHER; note = DNA nucleotide carrying a hypoxanthine nucleobase
  modified_base order(11,18,20,23,25): mod_base = OTHER; note = 2-Prime-Fluoro modified nucleoside
  modified_base order(1..10,12..13,17,19,21..22,24,26..29): mod_base = OTHER; note = 2-Prime-O-Methyl modified nucleoside
  modified_base order(1^2,28^29): mod_base = OTHER; note = (1,3-dimethylimidazolidin-2-ylidene) Phosphoramidate linkage
  modified_base order(2..16,17..28): mod_base = OTHER; note = Phosphorothioate linkage
  modified_base 16^17: mod_base = OTHER; note = Methylphosphonate linkage
  misc_feature 1..29: note = RM109018
gcatgatgccatacnntgccaccagggcg

SEQ ID NO: 244 - DNA, 29 bp, synthetic construct
  source 1..29: mol_type = other DNA
  misc_feature 12..13: note = DNA
  misc_feature order(1..11,14..29): note = RNA
  modified_base 11: mod_base = OTHER; note = 2-Prime-O-Methoxyethyl modified 5-methyl Cytidine
  modified_base 12: mod_base = OTHER; note = DNA nucleotide carrying a 6-amino-5-nitro-3-yl-2(1H)-pyridone nucleobase
  modified_base 13: mod_base = OTHER; note = DNA nucleotide carrying a hypoxanthine nucleobase
  modified_base order(8,15,17,20,22): mod_base = OTHER; note = 2-Prime-Fluoro modified nucleoside
  modified_base order(1..7,9..10,14,16,18..19,21,23..29): mod_base = OTHER; note = 2-Prime-O-Methyl modified nucleoside
  modified_base order(1^2,28^29): mod_base = OTHER; note = (1,3-dimethylimidazolidin-2-ylidene) Phosphoramidate linkage
  modified_base order(2..13,14..28): mod_base = OTHER; note = Phosphorothioate linkage
  modified_base 13^14: mod_base = OTHER; note = Methylphosphonate linkage
  misc_feature 1..29: note = RM109019
tgatgccatacnntgccaccagggcgatg

SEQ ID NO: 245 - DNA, 29 bp, synthetic construct
  source 1..29: mol_type = other DNA
  misc_feature 9..10: note = DNA
  misc_feature order(1..8,11..29): note = RNA
  modified_base 8: mod_base = OTHER; note = 2-Prime-O-Methoxyethyl modified 5-methyl Cytidine
  modified_base 9: mod_base = OTHER; note = DNA nucleotide carrying a 6-amino-5-nitro-3-yl-2(1H)-pyridone nucleobase
  modified_base 10: mod_base = OTHER; note = DNA nucleotide carrying a hypoxanthine nucleobase
  modified_base order(5,12,14,17,19): mod_base = OTHER; note = 2-Prime-Fluoro modified nucleoside
  modified_base order(1..4,6..7,11,13,15..16,18,20..29): mod_base = OTHER; note = 2-Prime-O-Methyl modified nucleoside
  modified_base order(1^2,28^29): mod_base = OTHER; note = (1,3-dimethylimidazolidin-2-ylidene) Phosphoramidate linkage
  modified_base order(2..10,11..28): mod_base = OTHER; note = Phosphorothioate linkage
  modified_base 10^11: mod_base = OTHER; note = Methylphosphonate linkage
  misc_feature 1..29: note = RM109020
tgccatacnntgccaccagggcgatggcc

SEQ ID NO: 246 - DNA, 29 bp, synthetic construct
  source 1..29: mol_type = other DNA
  misc_feature 6..7: note = DNA
  misc_feature order(1..5,8..29): note = RNA
  modified_base 5: mod_base = OTHER; note = 2-Prime-O-Methoxyethyl modified 5-methyl Cytidine
  modified_base 6: mod_base = OTHER; note = DNA nucleotide carrying a 6-amino-5-nitro-3-yl-2(1H)-pyridone nucleobase
  modified_base 7: mod_base = OTHER; note = DNA nucleotide carrying a hypoxanthine nucleobase
  modified_base order(2,9,11,14,16): mod_base = OTHER; note = 2-Prime-Fluoro modified nucleoside
  modified_base order(1,3..4,8,10,12..13,15,17..29): mod_base = OTHER; note = 2-Prime-O-Methyl modified nucleoside
  modified_base order(1^2,28^29): mod_base = OTHER; note = (1,3-dimethylimidazolidin-2-ylidene) Phosphoramidate linkage
  modified_base order(2..7,8..28): mod_base = OTHER; note = Phosphorothioate linkage
  modified_base 7^8: mod_base = OTHER; note = Methylphosphonate linkage
  misc_feature 1..29: note = RM109021
catacnntgccaccagggcgatggccagc

SEQ ID NO: 247 - DNA, 23 bp, synthetic construct
  source 1..23: mol_type = other DNA
  misc_feature 18..19: note = DNA
  misc_feature order(1..17,20..23): note = RNA
  modified_base 17: mod_base = OTHER; note = 2-Prime-O-Methoxyethyl modified 5-methyl Cytidine
  modified_base 18: mod_base = OTHER; note = DNA nucleotide carrying a 6-amino-5-nitro-3-yl-2(1H)-pyridone nucleobase
  modified_base 19: mod_base = OTHER; note = DNA nucleotide carrying a hypoxanthine nucleobase
  modified_base order(15,21): mod_base = OTHER; note = 2-Prime-Fluoro modified nucleoside
  modified_base order(1..14,16,20,22..23): mod_base = OTHER; note = 2-Prime-O-Methyl modified nucleoside
  modified_base order(1^2,22^23): mod_base = OTHER; note = (1,3-dimethylimidazolidin-2-ylidene) Phosphoramidate linkage
  modified_base order(2..19,20..22): mod_base = OTHER; note = Phosphorothioate linkage
  modified_base 19^20: mod_base = OTHER; note = Methylphosphonate linkage
  misc_feature 1..23: note = RM109022
ggggcatgatgccatacnntgcc

SEQ ID NO: 248 - DNA, 23 bp, synthetic construct
  source 1..23: mol_type = other DNA
  misc_feature 15..16: note = DNA
  misc_feature order(1..14,17..23): note = RNA
  modified_base 14: mod_base = OTHER; note = 2-Prime-O-Methoxyethyl modified 5-methyl Cytidine
  modified_base 15: mod_base = OTHER; note = DNA nucleotide carrying a 6-amino-5-nitro-3-yl-2(1H)-pyridone nucleobase
  modified_base 16: mod_base = OTHER; note = DNA nucleotide carrying a hypoxanthine nucleobase
  modified_base order(12,18): mod_base = OTHER; note = 2-Prime-Fluoro modified nucleoside
  modified_base order(1..11,13,17,19..23): mod_base = OTHER; note = 2-Prime-O-Methyl modified nucleoside
  modified_base order(1^2,22^23): mod_base = OTHER; note = (1,3-dimethylimidazolidin-2-ylidene) Phosphoramidate linkage
  modified_base order(2..16,17..22): mod_base = OTHER; note = Phosphorothioate linkage
  modified_base 16^17: mod_base = OTHER; note = Methylphosphonate linkage
  misc_feature 1..23: note = RM109023
gcatgatgccatacnntgccacc

SEQ ID NO: 249 - DNA, 23 bp, synthetic construct
  source 1..23: mol_type = other DNA
  misc_feature 12..13: note = DNA
  misc_feature order(1..11,14..23): note = RNA
  modified_base 11: mod_base = OTHER; note = 2-Prime-O-Methoxyethyl modified 5-methyl Cytidine
  modified_base 12: mod_base = OTHER; note = DNA nucleotide carrying a 6-amino-5-nitro-3-yl-2(1H)-pyridone nucleobase
  modified_base 13: mod_base = OTHER; note = DNA nucleotide carrying a hypoxanthine nucleobase
  modified_base order(9,15): mod_base = OTHER; note = 2-Prime-Fluoro modified nucleoside
  modified_base order(1..8,10,14,16..23): mod_base = OTHER; note = 2-Prime-O-Methyl modified nucleoside
  modified_base order(1^2,22^23): mod_base = OTHER; note = (1,3-dimethylimidazolidin-2-ylidene) Phosphoramidate linkage
  modified_base order(2..13,14..22): mod_base = OTHER; note = Phosphorothioate linkage
  modified_base 13^14: mod_base = OTHER; note = Methylphosphonate linkage
  misc_feature 1..23: note = RM109024
tgatgccatacnntgccaccagg

SEQ ID NO: 250 - DNA, 23 bp, synthetic construct
  source 1..23: mol_type = other DNA
  misc_feature 9..10: note = DNA
  misc_feature order(1..8,11..23): note = RNA
  modified_base 8: mod_base = OTHER; note = 2-Prime-O-Methoxyethyl modified 5-methyl Cytidine
  modified_base 9: mod_base = OTHER; note = DNA nucleotide carrying a 6-amino-5-nitro-3-yl-2(1H)-pyridone nucleobase
  modified_base 10: mod_base = OTHER; note = DNA nucleotide carrying a hypoxanthine nucleobase
  modified_base order(6,12): mod_base = OTHER; note = 2-Prime-Fluoro modified nucleoside
  modified_base order(1..5,7,11,13..23): mod_base = OTHER; note = 2-Prime-O-Methyl modified nucleoside
  modified_base order(1^2,22^23): mod_base = OTHER; note = (1,3-dimethylimidazolidin-2-ylidene) Phosphoramidate linkage
  modified_base order(2..10,11..22): mod_base = OTHER; note = Phosphorothioate linkage
  modified_base 10^11: mod_base = OTHER; note = Methylphosphonate linkage
  misc_feature 1..23: note = RM109025
tgccatacnntgccaccagggcg

SEQ ID NO: 251 - DNA, 23 bp, synthetic construct
  source 1..23: mol_type = other DNA
  misc_feature 6..7: note = DNA
  misc_feature order(1..5,8..23): note = RNA
  modified_base 5: mod_base = OTHER; note = 2-Prime-O-Methoxyethyl modified 5-methyl Cytidine
  modified_base 6: mod_base = OTHER; note = DNA nucleotide carrying a 6-amino-5-nitro-3-yl-2(1H)-pyridone nucleobase
  modified_base 7: mod_base = OTHER; note = DNA nucleotide carrying a hypoxanthine nucleobase
  modified_base order(3,9): mod_base = OTHER; note = 2-Prime-Fluoro modified nucleoside
  modified_base order(1..2,4,8,10..23): mod_base = OTHER; note = 2-Prime-O-Methyl modified nucleoside
  modified_base order(1^2,22^23): mod_base = OTHER; note = (1,3-dimethylimidazolidin-2-ylidene) Phosphoramidate linkage
  modified_base order(2..7,8..22): mod_base = OTHER; note = Phosphorothioate linkage
  modified_base 7^8: mod_base = OTHER; note = Methylphosphonate linkage
  misc_feature 1..23: note = RM109026
catacnntgccaccagggcgatg

SEQ ID NO: 252 - DNA, 26 bp, synthetic construct
  source 1..26: mol_type = other DNA
  misc_feature 22..23: note = DNA
  misc_feature order(1..21,24..26): note = RNA
  modified_base 21: mod_base = OTHER; note = 2-Prime-O-Methoxyethyl modified 5-methyl Cytidine
  modified_base 22: mod_base = OTHER; note = DNA nucleotide carrying a 6-amino-5-nitro-3-yl-2(1H)-pyridone nucleobase
  modified_base 23: mod_base = OTHER; note = DNA nucleotide carrying a hypoxanthine nucleobase
  modified_base order(19,25): mod_base = OTHER; note = 2-Prime-Fluoro modified nucleoside
  modified_base order(1..18,20,24,26): mod_base = OTHER; note = 2-Prime-O-Methyl modified nucleoside
  modified_base order(1^2,25^26): mod_base = OTHER; note = (1,3-dimethylimidazolidin-2-ylidene) Phosphoramidate linkage
  modified_base order(2..23,24^25): mod_base = OTHER; note = Phosphorothioate linkage
  modified_base 23^24: mod_base = OTHER; note = Methylphosphonate linkage
  misc_feature 1..26: note = RM109027
gtgaggggcatgatgccatacnntgc

SEQ ID NO: 253 - DNA, 26 bp, synthetic construct
  source 1..26: mol_type = other DNA
  misc_feature 19..20: note = DNA
  misc_feature order(1..18,21..26): note = RNA
  modified_base 18: mod_base = OTHER; note = 2-Prime-O-Methoxyethyl modified 5-methyl Cytidine
  modified_base 19: mod_base = OTHER; note = DNA nucleotide carrying a 6-amino-5-nitro-3-yl-2(1H)-pyridone nucleobase
  modified_base 20: mod_base = OTHER; note = DNA nucleotide carrying a hypoxanthine nucleobase
  modified_base order(16,22): mod_base = OTHER; note = 2-Prime-Fluoro modified nucleoside
  modified_base order(1..15,17,21,23..26): mod_base = OTHER; note = 2-Prime-O-Methyl modified nucleoside
  modified_base order(1^2,25^26): mod_base = OTHER; note = (1,3-dimethylimidazolidin-2-ylidene) Phosphoramidate linkage
  modified_base order(2..20,21..25): mod_base = OTHER; note = Phosphorothioate linkage
  modified_base 20^21: mod_base = OTHER; note = Methylphosphonate linkage
  misc_feature 1..26: note = RM109028
aggggcatgatgccatacnntgccac

SEQ ID NO: 254 - DNA, 26 bp, synthetic construct
  source 1..26: mol_type = other DNA
  misc_feature 16..17: note = DNA
  misc_feature order(1..15,18..26): note = RNA
  modified_base 15: mod_base = OTHER; note = 2-Prime-O-Methoxyethyl modified 5-methyl Cytidine
  modified_base 16: mod_base = OTHER; note = DNA nucleotide carrying a 6-amino-5-nitro-3-yl-2(1H)-pyridone nucleobase
  modified_base 17: mod_base = OTHER; note = DNA nucleotide carrying a hypoxanthine nucleobase
  modified_base order(13,19): mod_base = OTHER; note = 2-Prime-Fluoro modified nucleoside
  modified_base order(1..12,14,18,20..26): mod_base = OTHER; note = 2-Prime-O-Methyl modified nucleoside
  modified_base order(1^2,25^26): mod_base = OTHER; note = (1,3-dimethylimidazolidin-2-ylidene) Phosphoramidate linkage
  modified_base order(2..17,18..25): mod_base = OTHER; note = Phosphorothioate linkage
  modified_base 17^18: mod_base = OTHER; note = Methylphosphonate linkage
  misc_feature 1..26: note = RM109029
ggcatgatgccatacnntgccaccag

SEQ ID NO: 255 - DNA, 26 bp, synthetic construct
  source 1..26: mol_type = other DNA
  misc_feature 13..14: note = DNA
  misc_feature order(1..12,15..26): note = RNA
  modified_base 12: mod_base = OTHER; note = 2-Prime-O-Methoxyethyl modified 5-methyl Cytidine
  modified_base 13: mod_base = OTHER; note = DNA nucleotide carrying a 6-amino-5-nitro-3-yl-2(1H)-pyridone nucleobase
  modified_base 14: mod_base = OTHER; note = DNA nucleotide carrying a hypoxanthine nucleobase
  modified_base order(10,16): mod_base = OTHER; note = 2-Prime-Fluoro modified nucleoside
  modified_base order(1..9,11,15,17..26): mod_base = OTHER; note = 2-Prime-O-Methyl modified nucleoside
  modified_base order(1^2,25^26): mod_base = OTHER; note = (1,3-dimethylimidazolidin-2-ylidene) Phosphoramidate linkage
  modified_base order(2..14,15..25): mod_base = OTHER; note = Phosphorothioate linkage
  modified_base 14^15: mod_base = OTHER; note = Methylphosphonate linkage
  misc_feature 1..26: note = RM109030
atgatgccatacnntgccaccagggc

SEQ ID NO: 256 - DNA, 26 bp, synthetic construct
  source 1..26: mol_type = other DNA
  misc_feature 10..11: note = DNA
  misc_feature order(1..9,12..26): note = RNA
  modified_base 9: mod_base = OTHER; note = 2-Prime-O-Methoxyethyl modified 5-methyl Cytidine
  modified_base 10: mod_base = OTHER; note = DNA nucleotide carrying a 6-amino-5-nitro-3-yl-2(1H)-pyridone nucleobase
  modified_base 11: mod_base = OTHER; note = DNA nucleotide carrying a hypoxanthine nucleobase
  modified_base order(7,13): mod_base = OTHER; note = 2-Prime-Fluoro modified nucleoside
  modified_base order(1..6,8,12,14..26): mod_base = OTHER; note = 2-Prime-O-Methyl modified nucleoside
  modified_base order(1^2,25^26): mod_base = OTHER; note = (1,3-dimethylimidazolidin-2-ylidene) Phosphoramidate linkage
  modified_base order(2..11,12..25): mod_base = OTHER; note = Phosphorothioate linkage
  modified_base 11^12: mod_base = OTHER; note = Methylphosphonate linkage
  misc_feature 1..26: note = RM109031
atgccatacnntgccaccagggcgat

SEQ ID NO: 257 - DNA, 26 bp, synthetic construct
  source 1..26: mol_type = other DNA
  misc_feature 7..8: note = DNA
  misc_feature order(1..6,9..26): note = RNA
  modified_base 6: mod_base = OTHER; note = 2-Prime-O-Methoxyethyl modified 5-methyl Cytidine
  modified_base 7: mod_base = OTHER; note = DNA nucleotide carrying a 6-amino-5-nitro-3-yl-2(1H)-pyridone nucleobase
  modified_base 8: mod_base = OTHER; note = DNA nucleotide carrying a hypoxanthine nucleobase
  modified_base order(4,10): mod_base = OTHER; note = 2-Prime-Fluoro modified nucleoside
  modified_base order(1..3,5,9,11..26): mod_base = OTHER; note = 2-Prime-O-Methyl modified nucleoside
  modified_base order(1^2,25^26): mod_base = OTHER; note = (1,3-dimethylimidazolidin-2-ylidene) Phosphoramidate linkage
  modified_base order(2..8,9..25): mod_base = OTHER; note = Phosphorothioate linkage
  modified_base 8^9: mod_base = OTHER; note = Methylphosphonate linkage
  misc_feature 1..26: note = RM109032
ccatacnntgccaccagggcgatggc

SEQ ID NO: 258 - DNA, 29 bp, synthetic construct
  source 1..29: mol_type = other DNA
  misc_feature 24..25: note = DNA
  misc_feature order(1..23,26..29): note = RNA
  modified_base 23: mod_base = OTHER; note = 2-Prime-O-Methoxyethyl modified 5-methyl Cytidine
  modified_base 24: mod_base = OTHER; note = DNA nucleotide carrying a 6-amino-5-nitro-3-yl-2(1H)-pyridone nucleobase
  modified_base 25: mod_base = OTHER; note = DNA nucleotide carrying a hypoxanthine nucleobase
  modified_base order(21,27): mod_base = OTHER; note = 2-Prime-Fluoro modified nucleoside
  modified_base order(1..20,22,26,28..29): mod_base = OTHER; note = 2-Prime-O-Methyl modified nucleoside
  modified_base order(1^2,28^29): mod_base = OTHER; note = (1,3-dimethylimidazolidin-2-ylidene) Phosphoramidate linkage
  modified_base order(2..25,26..28): mod_base = OTHER; note = Phosphorothioate linkage
  modified_base 25^26: mod_base = OTHER; note = Methylphosphonate linkage
  misc_feature 1..29: note = RM109033
ccgtgaggggcatgatgccatacnntgcc

SEQ ID NO: 259 - DNA, 29 bp, synthetic construct
  source 1..29: mol_type = other DNA
  misc_feature 21..22: note = DNA
  misc_feature order(1..20,23..29): note = RNA
  modified_base 20: mod_base = OTHER; note = 2-Prime-O-Methoxyethyl modified 5-methyl Cytidine
  modified_base 21: mod_base = OTHER; note = DNA nucleotide carrying a 6-amino-5-nitro-3-yl-2(1H)-pyridone nucleobase
  modified_base 22: mod_base = OTHER; note = DNA nucleotide carrying a hypoxanthine nucleobase
  modified_base order(18,24): mod_base = OTHER; note = 2-Prime-Fluoro modified nucleoside
  modified_base order(1..17,19,23,25..29): mod_base = OTHER; note = 2-Prime-O-Methyl modified nucleoside
  modified_base order(1^2,28^29): mod_base = OTHER; note = (1,3-dimethylimidazolidin-2-ylidene) Phosphoramidate linkage
  modified_base order(2..22,23..28): mod_base = OTHER; note = Phosphorothioate linkage
  modified_base 22^23: mod_base = OTHER; note = Methylphosphonate linkage
  misc_feature 1..29: note = RM109034
tgaggggcatgatgccatacnntgccacc

SEQ ID NO: 260 - DNA, 29 bp, synthetic construct
  source 1..29: mol_type = other DNA
  misc_feature 18..19: note = DNA
  misc_feature order(1..17,20..29): note = RNA
  modified_base 17: mod_base = OTHER; note = 2-Prime-O-Methoxyethyl modified 5-methyl Cytidine
  modified_base 18: mod_base = OTHER; note = DNA nucleotide carrying a 6-amino-5-nitro-3-yl-2(1H)-pyridone nucleobase
  modified_base 19: mod_base = OTHER; note = DNA nucleotide carrying a hypoxanthine nucleobase
  modified_base order(15,21): mod_base = OTHER; note = 2-Prime-Fluoro modified nucleoside
  modified_base order(1..14,16,20,22..29): mod_base = OTHER; note = 2-Prime-O-Methyl modified nucleoside
  modified_base order(1^2,28^29): mod_base = OTHER; note = (1,3-dimethylimidazolidin-2-ylidene) Phosphoramidate linkage
  modified_base order(2..19,20..28): mod_base = OTHER; note = Phosphorothioate linkage
  modified_base 19^20: mod_base = OTHER; note = Methylphosphonate linkage
  misc_feature 1..29: note = RM109035
ggggcatgatgccatacnntgccaccagg

SEQ ID NO: 261 - DNA, 29 bp, synthetic construct
  source 1..29: mol_type = other DNA
  misc_feature 15..16: note = DNA
  misc_feature order(1..14,17..29): note = RNA
  modified_base 14: mod_base = OTHER; note = 2-Prime-O-Methoxyethyl modified 5-methyl Cytidine
  modified_base 15: mod_base = OTHER; note = DNA nucleotide carrying a 6-amino-5-nitro-3-yl-2(1H)-pyridone nucleobase
  modified_base 16: mod_base = OTHER; note = DNA nucleotide carrying a hypoxanthine nucleobase
  modified_base order(12,18): mod_base = OTHER; note = 2-Prime-Fluoro modified nucleoside
  modified_base order(1..11,13,17,19..29): mod_base = OTHER; note = 2-Prime-O-Methyl modified nucleoside
  modified_base order(1^2,28^29): mod_base = OTHER; note = (1,3-dimethylimidazolidin-2-ylidene) Phosphoramidate linkage
  modified_base order(2..16,17..28): mod_base = OTHER; note = Phosphorothioate linkage
  modified_base 16^17: mod_base = OTHER; note = Methylphosphonate linkage
  misc_feature 1..29: note = RM109036
gcatgatgccatacnntgccaccagggcg

SEQ ID NO: 262 - DNA, 29 bp, synthetic construct
  source 1..29: mol_type = other DNA
  misc_feature 12..13: note = DNA
  misc_feature order(1..11,14..29): note = RNA
  modified_base 11: mod_base = OTHER; note = 2-Prime-O-Methoxyethyl modified 5-methyl Cytidine
  modified_base 12: mod_base = OTHER; note = DNA nucleotide carrying a 6-amino-5-nitro-3-yl-2(1H)-pyridone nucleobase
  modified_base 13: mod_base = OTHER; note = DNA nucleotide carrying a hypoxanthine nucleobase
  modified_base order(9,15): mod_base = OTHER; note = 2-Prime-Fluoro modified nucleoside
  modified_base order(1..8,10,14,16..29): mod_base = OTHER; note = 2-Prime-O-Methyl modified nucleoside
  modified_base order(1^2,28^29): mod_base = OTHER; note = (1,3-dimethylimidazolidin-2-ylidene) Phosphoramidate linkage
  modified_base order(2..13,14..28): mod_base = OTHER; note = Phosphorothioate linkage
  modified_base 13^14: mod_base = OTHER; note = Methylphosphonate linkage
  misc_feature 1..29: note = RM109037
tgatgccatacnntgccaccagggcgatg

SEQ ID NO: 263 - DNA, 29 bp, synthetic construct
  source 1..29: mol_type = other DNA
  misc_feature 9..10: note = DNA
  misc_feature order(1..8,11..29): note = RNA
  modified_base 8: mod_base = OTHER; note = 2-Prime-O-Methoxyethyl modified 5-methyl Cytidine
  modified_base 9: mod_base = OTHER; note = DNA nucleotide carrying a 6-amino-5-nitro-3-yl-2(1H)-pyridone nucleobase
  modified_base 10: mod_base = OTHER; note = DNA nucleotide carrying a hypoxanthine nucleobase
  modified_base order(6,12): mod_base = OTHER; note = 2-Prime-Fluoro modified nucleoside
  modified_base order(1..5,7,11,13..29): mod_base = OTHER; note = 2-Prime-O-Methyl modified nucleoside
  modified_base order(1^2,28^29): mod_base = OTHER; note = (1,3-dimethylimidazolidin-2-ylidene) Phosphoramidate linkage
  modified_base order(2..10,11..28): mod_base = OTHER; note = Phosphorothioate linkage
  modified_base 10^11: mod_base = OTHER; note = Methylphosphonate linkage
  misc_feature 1..29: note = RM109038
tgccatacnntgccaccagggcgatggcc

SEQ ID NO: 264 - DNA, 29 bp, synthetic construct
  source 1..29: mol_type = other DNA
  misc_feature 6..7: note = DNA
  misc_feature order(1..5,8..29): note = RNA
  modified_base 5: mod_base = OTHER; note = 2-Prime-O-Methoxyethyl modified 5-methyl Cytidine
  modified_base 6: mod_base = OTHER; note = DNA nucleotide carrying a 6-amino-5-nitro-3-yl-2(1H)-pyridone nucleobase
  modified_base 7: mod_base = OTHER; note = DNA nucleotide carrying a hypoxanthine nucleobase
  modified_base order(3,9): mod_base = OTHER; note = 2-Prime-Fluoro modified nucleoside
  modified_base order(1..2,4,8,10..29): mod_base = OTHER; note = 2-Prime-O-Methyl modified nucleoside
  modified_base order(1^2,28^29): mod_base = OTHER; note = (1,3-dimethylimidazolidin-2-ylidene) Phosphoramidate linkage
  modified_base order(2..7,8..28): mod_base = OTHER; note = Phosphorothioate linkage
  modified_base 7^8: mod_base = OTHER; note = Methylphosphonate linkage
  misc_feature 1..29: note = RM109039
catacnntgccaccagggcgatggccagc

SEQ ID NO: 265 - DNA, 32 bp, synthetic construct; identical to SEQ ID NO: 191
  source 1..32: mol_type = other DNA
  misc_feature 10..11: note = DNA
  misc_feature order(1..9,12..32): note = RNA
  modified_base 9: mod_base = OTHER; note = 2-Prime-O-Methoxyethyl modified 5-methyl Cytidine
  modified_base 10: mod_base = OTHER; note = DNA nucleotide carrying a 6-amino-5-nitro-3-yl-2(1H)-pyridone nucleobase
  modified_base 11: mod_base = OTHER; note = DNA nucleotide carrying a hypoxanthine nucleobase
  modified_base order(8,13,19..20,26,30): mod_base = OTHER; note = 2-Prime-Fluoro modified nucleoside
  modified_base order(1..7,12,14..18,21..25,27..29,31..32): mod_base = OTHER; note = 2-Prime-O-Methyl modified nucleoside
  modified_base order(1^2,31^32): mod_base = OTHER; note = (1,3-dimethylimidazolidin-2-ylidene) Phosphoramidate linkage
  modified_base order(2..11,12..31): mod_base = OTHER; note = Phosphorothioate linkage
  modified_base 11^12: mod_base = OTHER; note = Methylphosphonate linkage
  misc_feature 1..32: note = RM109040

SEQ ID NO: 266 - DNA, 32 bp, synthetic construct; identical to SEQ ID NO: 192
  source 1..32: mol_type = other DNA
  misc_feature 7..8: note = DNA
  misc_feature order(1..6,9..32): note = RNA
  modified_base 6: mod_base = OTHER; note = 2-Prime-O-Methoxyethyl modified 5-methyl Cytidine
  modified_base 7: mod_base = OTHER; note = DNA nucleotide carrying a 6-amino-5-nitro-3-yl-2(1H)-pyridone nucleobase
  modified_base 8: mod_base = OTHER; note = DNA nucleotide carrying a hypoxanthine nucleobase
  modified_base order(5,10,16..17,23,27): mod_base = OTHER; note = 2-Prime-Fluoro modified nucleoside
  modified_base order(1..4,9,11..15,18..22,24..26,28..32): mod_base = OTHER; note = 2-Prime-O-Methyl modified nucleoside
  modified_base order(1^2,31^32): mod_base = OTHER; note = (1,3-dimethylimidazolidin-2-ylidene) Phosphoramidate linkage
  modified_base order(2..8,9..31): mod_base = OTHER; note = Phosphorothioate linkage
  modified_base 8^9: mod_base = OTHER; note = Methylphosphonate linkage
  misc_feature 1..32: note = RM109041

SEQ ID NO: 267 - DNA, 32 bp, synthetic construct; identical to SEQ ID NO: 185
  source 1..32: mol_type = other DNA
  misc_feature 28..29: note = DNA
  misc_feature order(1..27,30..32): note = RNA
  modified_base 27: mod_base = OTHER; note = 2-Prime-O-Methoxyethyl modified 5-methyl Cytidine
  modified_base 28: mod_base = OTHER; note = DNA nucleotide carrying a 6-amino-5-nitro-3-yl-2(1H)-pyridone nucleobase
  modified_base 29: mod_base = OTHER; note = DNA nucleotide carrying a hypoxanthine nucleobase
  modified_base order(10,14,20..21,31..32): mod_base = OTHER; note = 2-Prime-Fluoro modified nucleoside
  modified_base order(1..9,11..13,15..19,22..26,30): mod_base = OTHER; note = 2-Prime-O-Methyl modified nucleoside
  modified_base order(1^2,31^32): mod_base = OTHER; note = (1,3-dimethylimidazolidin-2-ylidene) Phosphoramidate linkage
  modified_base order(2..29,30^31): mod_base = OTHER; note = Phosphorothioate linkage
  modified_base 29^30: mod_base = OTHER; note = Methylphosphonate linkage
  misc_feature 1..32: note = RM109042

SEQ ID NO: 268 - DNA, 32 bp, synthetic construct; identical to SEQ ID NO: 186
  source 1..32: mol_type = other DNA
  misc_feature 25..26: note = DNA
  misc_feature order(1..24,27..32): note = RNA
  modified_base 24: mod_base = OTHER; note = 2-Prime-O-Methoxyethyl modified 5-methyl Cytidine
  modified_base 25: mod_base = OTHER; note = DNA nucleotide carrying a 6-amino-5-nitro-3-yl-2(1H)-pyridone nucleobase
  modified_base 26: mod_base = OTHER; note = DNA nucleotide carrying a hypoxanthine nucleobase
  modified_base order(7,11,17..18,28..29): mod_base = OTHER; note = 2-Prime-Fluoro modified nucleoside
  modified_base order(1..6,8..10,12..16,19..23,27,30..32): mod_base = OTHER; note = 2-Prime-O-Methyl modified nucleoside
  modified_base order(1^2,31^32): mod_base = OTHER; note = (1,3-dimethylimidazolidin-2-ylidene) Phosphoramidate linkage
  modified_base order(2..26,27..31): mod_base = OTHER; note = Phosphorothioate linkage
  modified_base 26^27: mod_base = OTHER; note = Methylphosphonate linkage
  misc_feature 1..32: note = RM109043

SEQ ID NO: 269 - DNA, 32 bp, synthetic construct; identical to SEQ ID NO: 187
  source 1..32: mol_type = other DNA
  misc_feature 22..23: note = DNA
  misc_feature order(1..21,24..32): note = RNA
  modified_base 21: mod_base = OTHER; note = 2-Prime-O-Methoxyethyl modified 5-methyl Cytidine
  modified_base 22: mod_base = OTHER; note = DNA nucleotide carrying a 6-amino-5-nitro-3-yl-2(1H)-pyridone nucleobase
  modified_base 23: mod_base = OTHER; note = DNA nucleotide carrying a hypoxanthine nucleobase
  modified_base order(4,8,14..15,25..26): mod_base = OTHER; note = 2-Prime-Fluoro modified nucleoside
  modified_base order(1..3,5..7,9..13,16..20,24,27..32): mod_base = OTHER; note = 2-Prime-O-Methyl modified nucleoside
  modified_base order(1^2,31^32): mod_base = OTHER; note = (1,3-dimethylimidazolidin-2-ylidene) Phosphoramidate linkage
  modified_base order(2..23,24..31): mod_base = OTHER; note = Phosphorothioate linkage
  modified_base 23^24: mod_base = OTHER; note = Methylphosphonate linkage
  misc_feature 1..32: note = RM109044

SEQ ID NO: 270 - DNA, 32 bp, synthetic construct; identical to SEQ ID NO: 5
  source 1..32: mol_type = other DNA
  misc_feature 19..20: note = DNA
  misc_feature order(1..18,21..32): note = RNA
  modified_base 18: mod_base = OTHER; note = 2-Prime-O-Methoxyethyl modified 5-methyl Cytidine
  modified_base 19: mod_base = OTHER; note = DNA nucleotide carrying a 6-amino-5-nitro-3-yl-2(1H)-pyridone nucleobase
  modified_base 20: mod_base = OTHER; note = DNA nucleotide carrying a hypoxanthine nucleobase
  modified_base order(1,5,11..12,22..23): mod_base = OTHER; note = 2-Prime-Fluoro modified nucleoside
  modified_base order(2..4,6..10,13..17,21,24..32): mod_base = OTHER; note = 2-Prime-O-Methyl modified nucleoside
  modified_base order(1^2,31^32): mod_base = OTHER; note = (1,3-dimethylimidazolidin-2-ylidene) Phosphoramidate linkage
  modified_base order(2..20,21..31): mod_base = OTHER; note = Phosphorothioate linkage
  modified_base 20^21: mod_base = OTHER; note = Methylphosphonate linkage
  misc_feature 1..32: note = RM109045

SEQ ID NO: 271 - DNA, 23 bp, synthetic construct
  source 1..23: mol_type = other DNA
  misc_feature 12..13: note = DNA
  misc_feature order(1..11,14..23): note = RNA
  modified_base 11: mod_base = OTHER; note = 2-Prime-O-Methoxyethyl modified 5-methyl Cytidine
  modified_base 12: mod_base = OTHER; note = DNA nucleotide carrying a 6-amino-5-nitro-3-yl-2(1H)-pyridone nucleobase
  modified_base 13: mod_base = OTHER; note = DNA nucleotide carrying a hypoxanthine nucleobase
  modified_base order(10,15,21..22): mod_base = OTHER; note = 2-Prime-Fluoro modified nucleoside
  modified_base order(1..9,14,16..20,23): mod_base = OTHER; note = 2-Prime-O-Methyl modified nucleoside
  modified_base order(1^2,22^23): mod_base = OTHER; note = (1,3-dimethylimidazolidin-2-ylidene) Phosphoramidate linkage
  modified_base order(2..13,14..22): mod_base = OTHER; note = Phosphorothioate linkage
  modified_base 13^14: mod_base = OTHER; note = Methylphosphonate linkage
  misc_feature 1..23: note = RM109046
tgatgccatacnntgccaccagg

SEQ ID NO: 272 - DNA, 23 bp, synthetic construct
  source 1..23: mol_type = other DNA
  misc_feature 9..10: note = DNA
  misc_feature order(1..8,11..23): note = RNA
  modified_base 8: mod_base = OTHER; note = 2-Prime-O-Methoxyethyl modified 5-methyl Cytidine
  modified_base 9: mod_base = OTHER; note = DNA nucleotide carrying a 6-amino-5-nitro-3-yl-2(1H)-pyridone nucleobase
  modified_base 10: mod_base = OTHER; note = DNA nucleotide carrying a hypoxanthine nucleobase
  modified_base order(7,12,18..19): mod_base = OTHER; note = 2-Prime-Fluoro modified nucleoside
  modified_base order(1..6,11,13..17,20..23): mod_base = OTHER; note = 2-Prime-O-Methyl modified nucleoside
  modified_base order(1^2,22^23): mod_base = OTHER; note = (1,3-dimethylimidazolidin-2-ylidene) Phosphoramidate linkage
  modified_base order(2..10,11..22): mod_base = OTHER; note = Phosphorothioate linkage
  modified_base 10^11: mod_base = OTHER; note = Methylphosphonate linkage
  misc_feature 1..23: note = RM109047
tgccatacnntgccaccagggcg

SEQ ID NO: 273 - DNA, 23 bp, synthetic construct
  source 1..23: mol_type = other DNA
  misc_feature 6..7: note = DNA
  misc_feature order(1..5,8..23): note = RNA
  modified_base 5: mod_base = OTHER; note = 2-Prime-O-Methoxyethyl modified 5-methyl Cytidine
  modified_base 6: mod_base = OTHER; note = DNA nucleotide carrying a 6-amino-5-nitro-3-yl-2(1H)-pyridone nucleobase
  modified_base 7: mod_base = OTHER; note = DNA nucleotide carrying a hypoxanthine nucleobase
  modified_base order(4,9,15..16): mod_base = OTHER; note = 2-Prime-Fluoro modified nucleoside
  modified_base order(1..3,8,10..14,17..23): mod_base = OTHER; note = 2-Prime-O-Methyl modified nucleoside
  modified_base order(1^2,22^23): mod_base = OTHER; note = (1,3-dimethylimidazolidin-2-ylidene) Phosphoramidate linkage
  modified_base order(2..7,8..22): mod_base = OTHER; note = Phosphorothioate linkage
  modified_base 7^8: mod_base = OTHER; note = Methylphosphonate linkage
  misc_feature 1..23: note = RM109048
catacnntgccaccagggcgatg

SEQ ID NO: 274 - DNA, 23 bp, synthetic construct
  source 1..23: mol_type = other DNA
  misc_feature 18..19: note = DNA
  misc_feature order(1..17,20..23): note = RNA
  modified_base 17: mod_base = OTHER; note = 2-Prime-O-Methoxyethyl modified 5-methyl Cytidine
  modified_base 18: mod_base = OTHER; note = DNA nucleotide carrying a 6-amino-5-nitro-3-yl-2(1H)-pyridone nucleobase
  modified_base 19: mod_base = OTHER; note = DNA nucleotide carrying a hypoxanthine nucleobase
  modified_base order(10..11,21..22): mod_base = OTHER; note = 2-Prime-Fluoro modified nucleoside
  modified_base order(1..9,12..16,20,23): mod_base = OTHER; note = 2-Prime-O-Methyl modified nucleoside
  modified_base order(1^2,22^23): mod_base = OTHER; note = (1,3-dimethylimidazolidin-2-ylidene) Phosphoramidate linkage
  modified_base order(2..19,20..22): mod_base = OTHER; note = Phosphorothioate linkage
  modified_base 19^20: mod_base = OTHER; note = Methylphosphonate linkage
  misc_feature 1..23: note = RM109049
ggggcatgatgccatacnntgcc

SEQ ID NO: 275 - DNA, 23 bp, synthetic construct
  source 1..23: mol_type = other DNA
  misc_feature 15..16: note = DNA
  misc_feature order(1..14,17..23): note = RNA
  modified_base 14: mod_base = OTHER; note = 2-Prime-O-Methoxyethyl modified 5-methyl Cytidine
  modified_base 15: mod_base = OTHER; note = DNA nucleotide carrying a 6-amino-5-nitro-3-yl-2(1H)-pyridone nucleobase
  modified_base 16: mod_base = OTHER; note = DNA nucleotide carrying a hypoxanthine nucleobase
  modified_base order(7..8,18..19): mod_base = OTHER; note = 2-Prime-Fluoro modified nucleoside
  modified_base order(1..6,9..13,17,20..23): mod_base = OTHER; note = 2-Prime-O-Methyl modified nucleoside
  modified_base order(1^2,22^23): mod_base = OTHER; note = (1,3-dimethylimidazolidin-2-ylidene) Phosphoramidate linkage
  modified_base order(2..16,17..22): mod_base = OTHER; note = Phosphorothioate linkage
  modified_base 16^17: mod_base = OTHER; note = Methylphosphonate linkage
  misc_feature 1..23: note = RM109050
gcatgatgccatacnntgccacc

SEQ ID NO: 276 - DNA, 23 bp, synthetic construct
  source 1..23: mol_type = other DNA
  misc_feature 12..13: note = DNA
  misc_feature order(1..11,14..23): note = RNA
  modified_base 11: mod_base = OTHER; note = 2-Prime-O-Methoxyethyl modified 5-methyl Cytidine
  modified_base 12: mod_base = OTHER; note = DNA nucleotide carrying a 6-amino-5-nitro-3-yl-2(1H)-pyridone nucleobase
  modified_base 13: mod_base = OTHER; note = DNA nucleotide carrying a hypoxanthine nucleobase
  modified_base order(4..5,15..16): mod_base = OTHER; note = 2-Prime-Fluoro modified nucleoside
  modified_base order(1..3,6..10,14,17..23): mod_base = OTHER; note = 2-Prime-O-Methyl modified nucleoside
  modified_base order(1^2,22^23): mod_base = OTHER; note = (1,3-dimethylimidazolidin-2-ylidene) Phosphoramidate linkage
  modified_base order(2..13,14..22): mod_base = OTHER; note = Phosphorothioate linkage
  modified_base 13^14: mod_base = OTHER; note = Methylphosphonate linkage
  misc_feature 1..23: note = RM109051
tgatgccatacnntgccaccagg

SEQ ID NO: 277 - DNA, 23 bp, synthetic construct
  source 1..23: mol_type = other DNA
  misc_feature 9..10: note = DNA
  misc_feature order(1..8,11..23): note = RNA
  modified_base 8: mod_base = OTHER; note = 2-Prime-O-Methoxyethyl modified 5-methyl Cytidine
  modified_base 9: mod_base = OTHER; note = DNA nucleotide carrying a 6-amino-5-nitro-3-yl-2(1H)-pyridone nucleobase
  modified_base 10: mod_base = OTHER; note = DNA nucleotide carrying a hypoxanthine nucleobase
  modified_base order(1..2,12..13): mod_base = OTHER; note = 2-Prime-Fluoro modified nucleoside
  modified_base order(3..7,11,14..23): mod_base = OTHER; note = 2-Prime-O-Methyl modified nucleoside
  modified_base order(1^2,22^23): mod_base = OTHER; note = (1,3-dimethylimidazolidin-2-ylidene) Phosphoramidate linkage
  modified_base order(2..10,11..22): mod_base = OTHER; note = Phosphorothioate linkage
  modified_base 10^11: mod_base = OTHER; note = Methylphosphonate linkage
  misc_feature 1..23: note = RM109052
tgccatacnntgccaccagggcg

SEQ ID NO: 278 - DNA, 23 bp, synthetic construct
  source 1..23: mol_type = other DNA
  misc_feature 18..19: note = DNA
  misc_feature order(1..17,20..23): note = RNA
  modified_base 17: mod_base = OTHER; note = 2-Prime-O-Methoxyethyl modified 5-methyl Cytidine
  modified_base 18: mod_base = OTHER; note = DNA nucleotide carrying a 6-amino-5-nitro-3-yl-2(1H)-pyridone nucleobase
  modified_base 19: mod_base = OTHER; note = DNA nucleotide carrying a hypoxanthine nucleobase
  modified_base order(16,21): mod_base = OTHER; note = 2-Prime-Fluoro modified nucleoside
  modified_base order(1..15,20,22..23): mod_base = OTHER; note = 2-Prime-O-Methyl modified nucleoside
  modified_base order(1^2,22^23): mod_base = OTHER; note = (1,3-dimethylimidazolidin-2-ylidene) Phosphoramidate linkage
  modified_base order(2..19,20..22): mod_base = OTHER; note = Phosphorothioate linkage
  modified_base 19^20: mod_base = OTHER; note = Methylphosphonate linkage
  misc_feature 1..23: note = RM109053
ggggcatgatgccatacnntgcc

SEQ ID NO: 279 - DNA, 23 bp, synthetic construct
  source 1..23: mol_type = other DNA
  misc_feature 15..16: note = DNA
  misc_feature order(1..14,17..23): note = RNA
  modified_base 14: mod_base = OTHER; note = 2-Prime-O-Methoxyethyl modified 5-methyl Cytidine
  modified_base 15: mod_base = OTHER; note = DNA nucleotide carrying a 6-amino-5-nitro-3-yl-2(1H)-pyridone nucleobase
  modified_base 16: mod_base = OTHER; note = DNA nucleotide carrying a hypoxanthine nucleobase
  modified_base order(13,18): mod_base = OTHER; note = 2-Prime-Fluoro modified nucleoside
  modified_base order(1..12,17,19..23): mod_base = OTHER; note = 2-Prime-O-Methyl modified nucleoside
  modified_base order(1^2,22^23): mod_base = OTHER; note = (1,3-dimethylimidazolidin-2-ylidene) Phosphoramidate linkage
  modified_base order(2..16,17..22): mod_base = OTHER; note = Phosphorothioate linkage
  modified_base 16^17: mod_base = OTHER; note = Methylphosphonate linkage
  misc_feature 1..23: note = RM109054
gcatgatgccatacnntgccacc

SEQ ID NO: 280 - DNA, 23 bp, synthetic construct
  source 1..23: mol_type = other DNA
  misc_feature 12..13: note = DNA
  misc_feature order(1..11,14..23): note = RNA
  modified_base 11: mod_base = OTHER; note = 2-Prime-O-Methoxyethyl modified 5-methyl Cytidine
  modified_base 12: mod_base = OTHER; note = DNA nucleotide carrying a 6-amino-5-nitro-3-yl-2(1H)-pyridone nucleobase
  modified_base 13: mod_base = OTHER; note = DNA nucleotide carrying a hypoxanthine nucleobase
  modified_base order(10,15): mod_base = OTHER; note = 2-Prime-Fluoro modified nucleoside
  modified_base order(1..9,14,16..23): mod_base = OTHER; note = 2-Prime-O-Methyl modified nucleoside
  modified_base order(1^2,22^23): mod_base = OTHER; note = (1,3-dimethylimidazolidin-2-ylidene) Phosphoramidate linkage
  modified_base order(2..13,14..22): mod_base = OTHER; note = Phosphorothioate linkage
  modified_base 13^14: mod_base = OTHER; note = Methylphosphonate linkage
  misc_feature 1..23: note = RM109055
tgatgccatacnntgccaccagg

SEQ ID NO: 281 - DNA, 23 bp, synthetic construct
  source 1..23: mol_type = other DNA
  misc_feature 9..10: note = DNA
  misc_feature order(1..8,11..23): note = RNA
  modified_base 8: mod_base = OTHER; note = 2-Prime-O-Methoxyethyl modified 5-methyl Cytidine
  modified_base 9: mod_base = OTHER; note = DNA nucleotide carrying a 6-amino-5-nitro-3-yl-2(1H)-pyridone nucleobase
  modified_base 10: mod_base = OTHER; note = DNA nucleotide carrying a hypoxanthine nucleobase
  modified_base order(7,12): mod_base = OTHER; note = 2-Prime-Fluoro modified nucleoside
  modified_base order(1..6,11,13..23): mod_base = OTHER; note = 2-Prime-O-Methyl modified nucleoside
  modified_base order(1^2,22^23): mod_base = OTHER; note = (1,3-dimethylimidazolidin-2-ylidene) Phosphoramidate linkage
  modified_base order(2..10,11..22): mod_base = OTHER; note = Phosphorothioate linkage
  modified_base 10^11: mod_base = OTHER; note = Methylphosphonate linkage
  misc_feature 1..23: note = RM109056
tgccatacnntgccaccagggcg

SEQ ID NO: 282 - DNA, 23 bp, synthetic construct
  source 1..23: mol_type = other DNA
  misc_feature 6..7: note = DNA
  misc_feature order(1..5,8..23): note = RNA
  modified_base 5: mod_base = OTHER; note = 2-Prime-O-Methoxyethyl modified 5-methyl Cytidine
  modified_base 6: mod_base = OTHER; note = DNA nucleotide carrying a 6-amino-5-nitro-3-yl-2(1H)-pyridone nucleobase
  modified_base 7: mod_base = OTHER; note = DNA nucleotide carrying a hypoxanthine nucleobase
  modified_base order(4,9): mod_base = OTHER; note = 2-Prime-Fluoro modified nucleoside
  modified_base order(1..3,8,10..23): mod_base = OTHER; note = 2-Prime-O-Methyl modified nucleoside
  modified_base order(1^2,22^23): mod_base = OTHER; note = (1,3-dimethylimidazolidin-2-ylidene) Phosphoramidate linkage
  modified_base order(2..7,8..22): mod_base = OTHER; note = Phosphorothioate linkage
  modified_base 7^8: mod_base = OTHER; note = Methylphosphonate linkage
  misc_feature 1..23: note = RM109057
catacnntgccaccagggcgatg

SEQ ID NO: 283 - DNA, 26 bp, synthetic construct
  source 1..26: mol_type = other DNA
  misc_feature 22..23: note = DNA
  misc_feature order(1..21,24..26): note = RNA
  modified_base 21: mod_base = OTHER; note = 2-Prime-O-Methoxyethyl modified 5-methyl Cytidine
  modified_base 22: mod_base = OTHER; note = DNA nucleotide carrying a 6-amino-5-nitro-3-yl-2(1H)-pyridone nucleobase
  modified_base 23: mod_base = OTHER; note = DNA nucleotide carrying a hypoxanthine nucleobase
  modified_base order(20,25): mod_base = OTHER; note = 2-Prime-Fluoro modified nucleoside
  modified_base order(1..19,24,26): mod_base = OTHER; note = 2-Prime-O-Methyl modified nucleoside
  modified_base order(1^2,25^26): mod_base = OTHER; note = (1,3-dimethylimidazolidin-2-ylidene) Phosphoramidate linkage
  modified_base order(2..23,24^25): mod_base = OTHER; note = Phosphorothioate linkage
  modified_base 23^24: mod_base = OTHER; note = Methylphosphonate linkage
  misc_feature 1..26: note = RM109058
gtgaggggcatgatgccatacnntgc

SEQ ID NO: 284 - DNA, 26 bp, synthetic construct
  source 1..26: mol_type = other DNA
  misc_feature 19..20: note = DNA
  misc_feature order(1..18,21..26): note = RNA
  modified_base 18: mod_base = OTHER; note = 2-Prime-O-Methoxyethyl modified 5-methyl Cytidine
  modified_base 19: mod_base = OTHER; note = DNA nucleotide carrying a 6-amino-5-nitro-3-yl-2(1H)-pyridone nucleobase
  modified_base 20: mod_base = OTHER; note = DNA nucleotide carrying a hypoxanthine nucleobase
  modified_base order(17,22): mod_base = OTHER; note = 2-Prime-Fluoro modified nucleoside
  modified_base order(1..16,21,23..26): mod_base = OTHER; note = 2-Prime-O-Methyl modified nucleoside
  modified_base order(1^2,25^26): mod_base = OTHER; note = (1,3-dimethylimidazolidin-2-ylidene) Phosphoramidate linkage
  modified_base order(2..20,21..25): mod_base = OTHER; note = Phosphorothioate linkage
  modified_base 20^21: mod_base = OTHER; note = Methylphosphonate linkage
  misc_feature 1..26: note = RM109059
aggggcatgatgccatacnntgccac

SEQ ID NO: 285 - DNA, 26 bp, synthetic construct
  source 1..26: mol_type = other DNA
  misc_feature 16..17: note = DNA
  misc_feature order(1..15,18..26): note = RNA
  modified_base 15: mod_base = OTHER; note = 2-Prime-O-Methoxyethyl modified 5-methyl Cytidine
  modified_base 16: mod_base = OTHER; note = DNA nucleotide carrying a 6-amino-5-nitro-3-yl-2(1H)-pyridone nucleobase
  modified_base 17: mod_base = OTHER; note = DNA nucleotide carrying a hypoxanthine nucleobase
  modified_base order(14,19): mod_base = OTHER; note = 2-Prime-Fluoro modified nucleoside
  modified_base order(1..13,18,20..26): mod_base = OTHER; note = 2-Prime-O-Methyl modified nucleoside
  modified_base order(1^2,25^26): mod_base = OTHER; note = (1,3-dimethylimidazolidin-2-ylidene) Phosphoramidate linkage
  modified_base order(2..17,18..25): mod_base = OTHER; note = Phosphorothioate linkage
  modified_base 17^18: mod_base = OTHER; note = Methylphosphonate linkage
  misc_feature 1..26: note = RM109060
ggcatgatgccatacnntgccaccag

SEQ ID NO: 286 - DNA, 26 bp, synthetic construct
  source 1..26: mol_type = other DNA
  misc_feature 13..14: note = DNA
  misc_feature order(1..12,15..26): note = RNA
  modified_base 12: mod_base = OTHER; note = 2-Prime-O-Methoxyethyl modified 5-methyl Cytidine
  modified_base 13: mod_base = OTHER; note = DNA nucleotide carrying a 6-amino-5-nitro-3-yl-2(1H)-pyridone nucleobase
  modified_base 14: mod_base = OTHER; note = DNA nucleotide carrying a hypoxanthine nucleobase
  modified_base order(11,16): mod_base = OTHER; note = 2-Prime-Fluoro modified nucleoside
  modified_base order(1..10,15,17..26): mod_base = OTHER; note = 2-Prime-O-Methyl modified nucleoside
  modified_base order(1^2,25^26): mod_base = OTHER; note = (1,3-dimethylimidazolidin-2-ylidene) Phosphoramidate linkage
  modified_base order(2..14,15..25): mod_base = OTHER; note = Phosphorothioate linkage
  modified_base 14^15: mod_base = OTHER; note = Methylphosphonate linkage
  misc_feature 1..26: note = RM109061
atgatgccatacnntgccaccagggc

SEQ ID NO: 287 - DNA, 26 bp, synthetic construct
  source 1..26: mol_type = other DNA
  misc_feature 10..11: note = DNA
  misc_feature order(1..9,12..26): note = RNA
  modified_base 9: mod_base = OTHER; note = 2-Prime-O-Methoxyethyl modified 5-methyl Cytidine
  modified_base 10: mod_base = OTHER; note = DNA nucleotide carrying a 6-amino-5-nitro-3-yl-2(1H)-pyridone nucleobase
  modified_base 11: mod_base = OTHER; note = DNA nucleotide carrying a hypoxanthine nucleobase
  modified_base order(8,13): mod_base = OTHER; note = 2-Prime-Fluoro modified nucleoside
  modified_base order(1..7,12,14..26): mod_base = OTHER; note = 2-Prime-O-Methyl modified nucleoside
  modified_base order(1^2,25^26): mod_base = OTHER; note = (1,3-dimethylimidazolidin-2-ylidene) Phosphoramidate linkage
  modified_base order(2..11,12..25): mod_base = OTHER; note = Phosphorothioate linkage
  modified_base 11^12: mod_base = OTHER; note = Methylphosphonate linkage
  misc_feature 1..26: note = RM109062
atgccatacnntgccaccagggcgat

SEQ ID NO: 288 - DNA, 26 bp, synthetic construct
  source 1..26: mol_type = other DNA
  misc_feature 7..8: note = DNA
  misc_feature order(1..6,9..26): note = RNA
  modified_base 6: mod_base = OTHER; note = 2-Prime-O-Methoxyethyl modified 5-methyl Cytidine
  modified_base 7: mod_base = OTHER; note = DNA nucleotide carrying a 6-amino-5-nitro-3-yl-2(1H)-pyridone nucleobase
  modified_base 8: mod_base = OTHER; note = DNA nucleotide carrying a hypoxanthine nucleobase
  modified_base order(5,10): mod_base = OTHER; note = 2-Prime-Fluoro modified nucleoside
  modified_base order(1..4,9,11..26): mod_base = OTHER; note = 2-Prime-O-Methyl modified nucleoside
  modified_base order(1^2,25^26): mod_base = OTHER; note = (1,3-dimethylimidazolidin-2-ylidene) Phosphoramidate linkage
  modified_base order(2..8,9..25): mod_base = OTHER; note = Phosphorothioate linkage
  modified_base 8^9: mod_base = OTHER; note = Methylphosphonate linkage
  misc_feature 1..26: note = RM109063
ccatacnntgccaccagggcgatggc

SEQ ID NO: 289 - DNA, 29 bp, synthetic construct
  source 1..29: mol_type = other DNA
  misc_feature 24..25: note = DNA
  misc_feature order(1..23,26..29): note = RNA
  modified_base 23: mod_base = OTHER; note = 2-Prime-O-Methoxyethyl modified 5-methyl Cytidine
  modified_base 24: mod_base = OTHER; note = DNA nucleotide carrying a 6-amino-5-nitro-3-yl-2(1H)-pyridone nucleobase
  modified_base 25: mod_base = OTHER; note = DNA nucleotide carrying a hypoxanthine nucleobase
  modified_base order(22,27): mod_base = OTHER; note = 2-Prime-Fluoro modified nucleoside
  modified_base order(1..21,26,28..29): mod_base = OTHER; note = 2-Prime-O-Methyl modified nucleoside
  modified_base order(1^2,28^29): mod_base = OTHER; note = (1,3-dimethylimidazolidin-2-ylidene) Phosphoramidate linkage
  modified_base order(2..25,26..28): mod_base = OTHER; note = Phosphorothioate linkage
  modified_base 25^26: mod_base = OTHER; note = Methylphosphonate linkage
  misc_feature 1..29: note = RM109064
ccgtgaggggcatgatgccatacnntgcc

SEQ ID NO: 290 - DNA, 29 bp, synthetic construct
  source 1..29: mol_type = other DNA
  misc_feature 21..22: note = DNA
  misc_feature order(1..20,23..29): note = RNA
  modified_base 20: mod_base = OTHER; note = 2-Prime-O-Methoxyethyl modified 5-methyl Cytidine
  modified_base 21: mod_base = OTHER; note = DNA nucleotide carrying a 6-amino-5-nitro-3-yl-2(1H)-pyridone nucleobase
  modified_base 22: mod_base = OTHER; note = DNA nucleotide carrying a hypoxanthine nucleobase
  modified_base order(19,24): mod_base = OTHER; note = 2-Prime-Fluoro modified nucleoside
  modified_base order(1..18,23,25..29): mod_base = OTHER; note = 2-Prime-O-Methyl modified nucleoside
  modified_base order(1^2,28^29): mod_base = OTHER; note = (1,3-dimethylimidazolidin-2-ylidene) Phosphoramidate linkage
  modified_base order(2..22,23..28): mod_base = OTHER; note = Phosphorothioate linkage
  modified_base 22^23: mod_base = OTHER; note = Methylphosphonate linkage
  misc_feature 1..29: note = RM109065
tgaggggcatgatgccatacnntgccacc

SEQ ID NO: 291 - DNA, 29 bp, synthetic construct
  source 1..29: mol_type = other DNA
  misc_feature 18..19: note = DNA
  misc_feature order(1..17,20..29): note = RNA
  modified_base 17: mod_base = OTHER; note = 2-Prime-O-Methoxyethyl modified 5-methyl Cytidine
  modified_base 18: mod_base = OTHER; note = DNA nucleotide carrying a 6-amino-5-nitro-3-yl-2(1H)-pyridone nucleobase
  modified_base 19: mod_base = OTHER; note = DNA nucleotide carrying a hypoxanthine nucleobase
  modified_base order(16,21): mod_base = OTHER; note = 2-Prime-Fluoro modified nucleoside
  modified_base order(1..15,20,22..29): mod_base = OTHER; note = 2-Prime-O-Methyl modified nucleoside
  modified_base order(1^2,28^29): mod_base = OTHER; note = (1,3-dimethylimidazolidin-2-ylidene) Phosphoramidate linkage
  modified_base order(2..19,20..28): mod_base = OTHER; note = Phosphorothioate linkage
  modified_base 19^20: mod_base = OTHER; note = Methylphosphonate linkage
  misc_feature 1..29: note = RM109066
ggggcatgatgccatacnntgccaccagg

SEQ ID NO: 292 - DNA, 29 bp, synthetic construct
  source 1..29: mol_type = other DNA
  misc_feature 15..16: note = DNA
  misc_feature order(1..14,17..29): note = RNA
  modified_base 14: mod_base = OTHER; note = 2-Prime-O-Methoxyethyl modified 5-methyl Cytidine
  modified_base 15: mod_base = OTHER; note = DNA nucleotide carrying a 6-amino-5-nitro-3-yl-2(1H)-pyridone nucleobase
  modified_base 16: mod_base = OTHER; note = DNA nucleotide carrying a hypoxanthine nucleobase
  modified_base order(13,18): mod_base = OTHER; note = 2-Prime-Fluoro modified nucleoside
  modified_base order(1..12,17,19..29): mod_base = OTHER; note = 2-Prime-O-Methyl modified nucleoside
  modified_base order(1^2,28^29): mod_base = OTHER; note = (1,3-dimethylimidazolidin-2-ylidene) Phosphoramidate linkage
  modified_base order(2..16,17..28): mod_base = OTHER; note = Phosphorothioate linkage
  modified_base 16^17: mod_base = OTHER; note = Methylphosphonate linkage
  misc_feature 1..29: note = RM109067
gcatgatgccatacnntgccaccagggcg

SEQ ID NO: 293 - DNA, 29 bp, synthetic construct
  source 1..29: mol_type = other DNA
  misc_feature 12..13: note = DNA
  misc_feature order(1..11,14..29): note = RNA
  modified_base 11: mod_base = OTHER; note = 2-Prime-O-Methoxyethyl modified 5-methyl Cytidine
  modified_base 12: mod_base = OTHER; note = DNA nucleotide carrying a 6-amino-5-nitro-3-yl-2(1H)-pyridone nucleobase
  modified_base 13: mod_base = OTHER; note = DNA nucleotide carrying a hypoxanthine nucleobase
  modified_base order(10,15): mod_base = OTHER; note = 2-Prime-Fluoro modified nucleoside
  modified_base order(1..9,14,16..29): mod_base = OTHER; note = 2-Prime-O-Methyl modified nucleoside
  modified_base order(1^2,28^29): mod_base = OTHER; note = (1,3-dimethylimidazolidin-2-ylidene) Phosphoramidate linkage
  modified_base order(2..13,14..28): mod_base = OTHER; note = Phosphorothioate linkage
  modified_base 13^14: mod_base = OTHER; note = Methylphosphonate linkage
  misc_feature 1..29: note = RM109068
tgatgccatacnntgccaccagggcgatg

SEQ ID NO: 294 - DNA, 29 bp, synthetic construct
  source 1..29: mol_type = other DNA
  misc_feature 9..10: note = DNA
  misc_feature order(1..8,11..29): note = RNA
  modified_base 8: mod_base = OTHER; note = 2-Prime-O-Methoxyethyl modified 5-methyl Cytidine
  modified_base 9: mod_base = OTHER; note = DNA nucleotide carrying a 6-amino-5-nitro-3-yl-2(1H)-pyridone nucleobase
  modified_base 10: mod_base = OTHER; note = DNA nucleotide carrying a hypoxanthine nucleobase
  modified_base order(7,12): mod_base = OTHER; note = 2-Prime-Fluoro modified nucleoside
  modified_base order(1..6,11,13..29): mod_base = OTHER; note = 2-Prime-O-Methyl modified nucleoside
  modified_base order(1^2,28^29): mod_base = OTHER; note = (1,3-dimethylimidazolidin-2-ylidene) Phosphoramidate linkage
  modified_base order(2..10,11..28): mod_base = OTHER; note = Phosphorothioate linkage
  modified_base 10^11: mod_base = OTHER; note = Methylphosphonate linkage
  misc_feature 1..29: note = RM109069
tgccatacnntgccaccagggcgatggcc

SEQ ID NO: 295 - DNA, 29 bp, synthetic construct
  source 1..29: mol_type = other DNA
  misc_feature 6..7: note = DNA
  misc_feature order(1..5,8..29): note = RNA
  modified_base 5: mod_base = OTHER; note = 2-Prime-O-Methoxyethyl modified 5-methyl Cytidine
  modified_base 6: mod_base = OTHER; note = DNA nucleotide carrying a 6-amino-5-nitro-3-yl-2(1H)-pyridone nucleobase
  modified_base 7: mod_base = OTHER; note = DNA nucleotide carrying a hypoxanthine nucleobase
  modified_base order(4,9): mod_base = OTHER; note = 2-Prime-Fluoro modified nucleoside
  modified_base order(1..3,8,10..29): mod_base = OTHER; note = 2-Prime-O-Methyl modified nucleoside
  modified_base order(1^2,28^29): mod_base = OTHER; note = (1,3-dimethylimidazolidin-2-ylidene) Phosphoramidate linkage
  modified_base order(2..7,8..28): mod_base = OTHER; note = Phosphorothioate linkage
  modified_base 7^8: mod_base = OTHER; note = Methylphosphonate linkage
  misc_feature 1..29: note = RM109070
catacnntgccaccagggcgatggccagc

SEQ ID NO: 296 - DNA, 32 bp, synthetic construct; identical to SEQ ID NO: 186
  source 1..32: mol_type = other DNA
  misc_feature 25..26: note = DNA
  misc_feature order(1..24,27..32): note = RNA
  modified_base 24: mod_base = OTHER; note = 2-Prime-O-Methoxyethyl modified 5-methyl Cytidine
  modified_base 25: mod_base = OTHER; note = DNA nucleotide carrying a 6-amino-5-nitro-3-yl-2(1H)-pyridone nucleobase
  modified_base 26: mod_base = OTHER; note = DNA nucleotide carrying a hypoxanthine nucleobase
  modified_base order(3,5,11,14..15,19..20,28,30): mod_base = OTHER; note = 2-Prime-Fluoro modified nucleoside
  modified_base order(1..2,4,6..10,12..13,16..18,21..23,27,29,31..32): mod_base = OTHER; note = 2-Prime-O-Methyl modified nucleoside
  modified_base order(1^2,31^32): mod_base = OTHER; note = (1,3-dimethylimidazolidin-2-ylidene) Phosphoramidate linkage
  modified_base order(2..26,27..31): mod_base = OTHER; note = Phosphorothioate linkage
  modified_base 26^27: mod_base = OTHER; note = Methylphosphonate linkage
  misc_feature 1..32: note = RM109071

SEQ ID NO: 297 - DNA, 32 bp, synthetic construct; identical to SEQ ID NO: 192
  source 1..32: mol_type = other DNA
  misc_feature 7..8: note = DNA
  misc_feature order(1..6,9..32): note = RNA
  modified_base 6: mod_base = OTHER; note = 2-Prime-O-Methoxyethyl modified 5-methyl Cytidine
  modified_base 7: mod_base = OTHER; note = DNA nucleotide carrying a 6-amino-5-nitro-3-yl-2(1H)-pyridone nucleobase
  modified_base 8: mod_base = OTHER; note = DNA nucleotide carrying a hypoxanthine nucleobase
  modified_base order(4,10,14..15,19..20,23,29,31): mod_base = OTHER; note = 2-Prime-Fluoro modified nucleoside
  modified_base order(1..3,5,9,11..13,16..18,21..22,24..28,30,32): mod_base = OTHER; note = 2-Prime-O-Methyl modified nucleoside
  modified_base order(1^2,31^32): mod_base = OTHER; note = (1,3-dimethylimidazolidin-2-ylidene) Phosphoramidate linkage
  modified_base order(2..8,9..31): mod_base = OTHER; note = Phosphorothioate linkage
  modified_base 8^9: mod_base = OTHER; note = Methylphosphonate linkage
  misc_feature 1..32: note = RM109072

SEQ ID NO: 298 - DNA, 23 bp, synthetic construct
  source 1..23: mol_type = other DNA
  misc_feature 18..19: note = DNA
  misc_feature order(1..17,20..23): note = RNA
  modified_base 17: mod_base = OTHER; note = 2-Prime-O-Methoxyethyl modified 5-methyl Cytidine
  modified_base 18: mod_base = OTHER; note = DNA nucleotide carrying a 6-amino-5-nitro-3-yl-2(1H)-pyridone nucleobase
  modified_base 19: mod_base = OTHER; note = DNA nucleotide carrying a hypoxanthine nucleobase
  modified_base order(7..8,12..13,21,23): mod_base = OTHER; note = 2-Prime-Fluoro modified nucleoside
  modified_base order(1..6,9..11,14..16,20,22): mod_base = OTHER; note = 2-Prime-O-Methyl modified nucleoside
  modified_base order(1^2,22^23): mod_base = OTHER; note = (1,3-dimethylimidazolidin-2-ylidene) Phosphoramidate linkage
  modified_base order(2..19,20..22): mod_base = OTHER; note = Phosphorothioate linkage
  modified_base 19^20: mod_base = OTHER; note = Methylphosphonate linkage
  misc_feature 1..23: note = RM109073
ggggcatgatgccatacnntgcc

SEQ ID NO: 299 - DNA, 23 bp, synthetic construct
  source 1..23: mol_type = other DNA
  misc_feature 15..16: note = DNA
  misc_feature order(1..14,17..23): note = RNA
  modified_base 14: mod_base = OTHER; note = 2-Prime-O-Methoxyethyl modified 5-methyl Cytidine
  modified_base 15: mod_base = OTHER; note = DNA nucleotide carrying a 6-amino-5-nitro-3-yl-2(1H)-pyridone nucleobase
  modified_base 16: mod_base = OTHER; note = DNA nucleotide carrying a hypoxanthine nucleobase
  modified_base order(4..5,9..10,18,20): mod_base = OTHER; note = 2-Prime-Fluoro modified nucleoside
  modified_base order(1..3,6..8,11..13,17,19,21..23): mod_base = OTHER; note = 2-Prime-O-Methyl modified nucleoside
  modified_base order(1^2,22^23): mod_base = OTHER; note = (1,3-dimethylimidazolidin-2-ylidene) Phosphoramidate linkage
  modified_base order(2..16,17..22): mod_base = OTHER; note = Phosphorothioate linkage
  modified_base 16^17: mod_base = OTHER; note = Methylphosphonate linkage
  misc_feature 1..23: note = RM109074
gcatgatgccatacnntgccacc

SEQ ID NO: 300 - DNA, 23 bp, synthetic construct
  source 1..23: mol_type = other DNA
  misc_feature 12..13: note = DNA
  misc_feature order(1..11,14..23): note = RNA
  modified_base 11: mod_base = OTHER; note = 2-Prime-O-Methoxyethyl modified 5-methyl Cytidine
  modified_base 12: mod_base = OTHER; note = DNA nucleotide carrying a 6-amino-5-nitro-3-yl-2(1H)-pyridone nucleobase
  modified_base 13: mod_base = OTHER; note = DNA nucleotide carrying a hypoxanthine nucleobase
  modified_base order(1..2,6..7,15,17): mod_base = OTHER; note = 2-Prime-Fluoro modified nucleoside
  modified_base order(3..5,8..10,14,16,18..23): mod_base = OTHER; note = 2-Prime-O-Methyl modified nucleoside
  modified_base order(1^2,22^23): mod_base = OTHER; note = (1,3-dimethylimidazolidin-2-ylidene) Phosphoramidate linkage
  modified_base order(2..13,14..22): mod_base = OTHER; note = Phosphorothioate linkage
  modified_base 13^14: mod_base = OTHER; note = Methylphosphonate linkage
  misc_feature 1..23: note = RM109075
tgatgccatacnntgccaccagg

SEQ ID NO: 301 - DNA, 32 bp, synthetic construct; identical to SEQ ID NO: 186
  source 1..32: mol_type = other DNA
  misc_feature 25..26: note = DNA
  misc_feature order(1..24,27..32): note = RNA
  modified_base 24: mod_base = OTHER; note = 2-Prime-O-Methoxyethyl modified 5-methyl Cytidine
  modified_base 25: mod_base = OTHER; note = DNA nucleotide carrying a 6-amino-5-nitro-3-yl-2(1H)-pyridone nucleobase
  modified_base 26: mod_base = OTHER; note = DNA nucleotide carrying a hypoxanthine nucleobase
  modified_base order(14..15,19..20,28,30): mod_base = OTHER; note = 2-Prime-Fluoro modified nucleoside
  modified_base order(1..13,16..18,21..23,27,29,31..32): mod_base = OTHER; note = 2-Prime-O-Methyl modified nucleoside
  modified_base order(1^2,31^32): mod_base = OTHER; note = (1,3-dimethylimidazolidin-2-ylidene) Phosphoramidate linkage
  modified_base order(2..26,27..31): mod_base = OTHER; note = Phosphorothioate linkage
  modified_base 26^27: mod_base = OTHER; note = Methylphosphonate linkage
  misc_feature 1..32: note = RM109076

SEQ ID NO: 302 - DNA, 32 bp, synthetic construct; identical to SEQ ID NO: 187
  source 1..32: mol_type = other DNA
  misc_feature 22..23: note = DNA
  misc_feature order(1..21,24..32): note = RNA
  modified_base 21: mod_base = OTHER; note = 2-Prime-O-Methoxyethyl modified 5-methyl Cytidine
  modified_base 22: mod_base = OTHER; note = DNA nucleotide carrying a 6-amino-5-nitro-3-yl-2(1H)-pyridone nucleobase
  modified_base 23: mod_base = OTHER; note = DNA nucleotide carrying a hypoxanthine nucleobase
  modified_base order(11..12,16..17,25,27): mod_base = OTHER; note = 2-Prime-Fluoro modified nucleoside
  modified_base order(1..10,13..15,18..20,24,26,28..32): mod_base = OTHER; note = 2-Prime-O-Methyl modified nucleoside
  modified_base order(1^2,31^32): mod_base = OTHER; note = (1,3-dimethylimidazolidin-2-ylidene) Phosphoramidate linkage
  modified_base order(2..23,24..31): mod_base = OTHER; note = Phosphorothioate linkage
  modified_base 23^24: mod_base = OTHER; note = Methylphosphonate linkage
  misc_feature 1..32: note = RM109077

SEQ ID NO: 303 - DNA, 32 bp, synthetic construct; identical to SEQ ID NO: 5
  source 1..32: mol_type = other DNA
  misc_feature 19..20: note = DNA
  misc_feature order(1..18,21..32): note = RNA
  modified_base 18: mod_base = OTHER; note = 2-Prime-O-Methoxyethyl modified 5-methyl Cytidine
  modified_base 19: mod_base = OTHER; note = DNA nucleotide carrying a 6-amino-5-nitro-3-yl-2(1H)-pyridone nucleobase
  modified_base 20: mod_base = OTHER; note = DNA nucleotide carrying a hypoxanthine nucleobase
  modified_base order(8..9,13..14,22,24): mod_base = OTHER; note = 2-Prime-Fluoro modified nucleoside
  modified_base order(1..7,10..12,15..17,21,23,25..32): mod_base = OTHER; note = 2-Prime-O-Methyl modified nucleoside
  modified_base order(1^2,31^32): mod_base = OTHER; note = (1,3-dimethylimidazolidin-2-ylidene) Phosphoramidate linkage
  modified_base order(2..20,21..31): mod_base = OTHER; note = Phosphorothioate linkage
  modified_base 20^21: mod_base = OTHER; note = Methylphosphonate linkage
  misc_feature 1..32: note = RM109078

SEQ ID NO: 304 - DNA, 32 bp, synthetic construct; identical to SEQ ID NO: 189
  source 1..32: mol_type = other DNA
  misc_feature 16..17: note = DNA
  misc_feature order(1..15,18..32): note = RNA
  modified_base 15: mod_base = OTHER; note = 2-Prime-O-Methoxyethyl modified 5-methyl Cytidine
  modified_base 16: mod_base = OTHER; note = DNA nucleotide carrying a 6-amino-5-nitro-3-yl-2(1H)-pyridone nucleobase
  modified_base 17: mod_base = OTHER; note = DNA nucleotide carrying a hypoxanthine nucleobase
  modified_base order(5..6,10..11,19,21): mod_base = OTHER; note = 2-Prime-Fluoro modified nucleoside
  modified_base order(1..4,7..9,12..14,18,20,22..32): mod_base = OTHER; note = 2-Prime-O-Methyl modified nucleoside
  modified_base order(1^2,31^32): mod_base = OTHER; note = (1,3-dimethylimidazolidin-2-ylidene) Phosphoramidate linkage
  modified_base order(2..17,18..31): mod_base = OTHER; note = Phosphorothioate linkage
  modified_base 17^18: mod_base = OTHER; note = Methylphosphonate linkage
  misc_feature 1..32: note = RM109079

SEQ ID NO: 305 - DNA, 32 bp, synthetic construct; identical to SEQ ID NO: 190
  source 1..32: mol_type = other DNA
  misc_feature 13..14: note = DNA
  misc_feature order(1..12,15..32): note = RNA
  modified_base 12: mod_base = OTHER; note = 2-Prime-O-Methoxyethyl modified 5-methyl Cytidine
  modified_base 13: mod_base = OTHER; note = DNA nucleotide carrying a 6-amino-5-nitro-3-yl-2(1H)-pyridone nucleobase
  modified_base 14: mod_base = OTHER; note = DNA nucleotide carrying a hypoxanthine nucleobase
  modified_base order(2..3,7..8,16,18): mod_base = OTHER; note = 2-Prime-Fluoro modified nucleoside
  modified_base order(1,4..6,9..11,15,17,19..32): mod_base = OTHER; note = 2-Prime-O-Methyl modified nucleoside
  modified_base order(1^2,31^32): mod_base = OTHER; note = (1,3-dimethylimidazolidin-2-ylidene) Phosphoramidate linkage
  modified_base order(2..14,15..31): mod_base = OTHER; note = Phosphorothioate linkage
  modified_base 14^15: mod_base = OTHER; note = Methylphosphonate linkage
  misc_feature 1..32: note = RM109080

SEQ ID NO: 306 - DNA, 23 bp, synthetic construct
  source 1..23: mol_type = other DNA
  misc_feature 9..10: note = DNA
  misc_feature order(1..8,11..23): note = RNA
  modified_base 8: mod_base = OTHER; note = 2-Prime-O-Methoxyethyl modified 5-methyl Cytidine
  modified_base 9: mod_base = OTHER; note = DNA nucleotide carrying a 6-amino-5-nitro-3-yl-2(1H)-pyridone nucleobase
  modified_base 10: mod_base = OTHER; note = DNA nucleotide carrying a hypoxanthine nucleobase
  modified_base order(6,12,16..17,21..22): mod_base = OTHER; note = 2-Prime-Fluoro modified nucleoside
  modified_base order(1..5,7,11,13..15,18..20,23): mod_base = OTHER; note = 2-Prime-O-Methyl modified nucleoside
  modified_base order(1^2,22^23): mod_base = OTHER; note = (1,3-dimethylimidazolidin-2-ylidene) Phosphoramidate linkage
  modified_base order(2..10,11..22): mod_base = OTHER; note = Phosphorothioate linkage
  modified_base 10^11: mod_base = OTHER; note = Methylphosphonate linkage
  misc_feature 1..23: note = RM109081
tgccatacnntgccaccagggcg

SEQ ID NO: 307 - DNA, 23 bp, synthetic construct
  source 1..23: mol_type = other DNA
  misc_feature 6..7: note = DNA
  misc_feature order(1..5,8..23): note = RNA
  modified_base 5: mod_base = OTHER; note = 2-Prime-O-Methoxyethyl modified 5-methyl Cytidine
  modified_base 6: mod_base = OTHER; note = DNA nucleotide carrying a 6-amino-5-nitro-3-yl-2(1H)-pyridone nucleobase
  modified_base 7: mod_base = OTHER; note = DNA nucleotide carrying a hypoxanthine nucleobase
  modified_base order(3,9,13..14,18..19): mod_base = OTHER; note = 2-Prime-Fluoro modified nucleoside
  modified_base order(1..2,4,8,10..12,15..17,20..23): mod_base = OTHER; note = 2-Prime-O-Methyl modified nucleoside
  modified_base order(1^2,22^23): mod_base = OTHER; note = (1,3-dimethylimidazolidin-2-ylidene) Phosphoramidate linkage
  modified_base order(2..7,8..22): mod_base = OTHER; note = Phosphorothioate linkage
  modified_base 7^8: mod_base = OTHER; note = Methylphosphonate linkage
  misc_feature 1..23: note = RM109082
catacnntgccaccagggcgatg

SEQ ID NO: 308 - DNA, 32 bp, synthetic construct; identical to SEQ ID NO: 5
  source 1..32: mol_type = other DNA
  misc_feature 19..20: note = DNA
  misc_feature order(1..18,21..32): note = RNA
  modified_base 18: mod_base = OTHER; note = 2-Prime-O-Methoxyethyl modified 5-methyl Cytidine
  modified_base 19: mod_base = OTHER; note = DNA nucleotide carrying a 6-amino-5-nitro-3-yl-2(1H)-pyridone nucleobase
  modified_base 20: mod_base = OTHER; note = DNA nucleotide carrying a hypoxanthine nucleobase
  modified_base order(16,22,26..27,31..32): mod_base = OTHER; note = 2-Prime-Fluoro modified nucleoside
  modified_base order(1..15,17,21,23..25,28..30): mod_base = OTHER; note = 2-Prime-O-Methyl modified nucleoside
  modified_base order(1^2,31^32): mod_base = OTHER; note = (1,3-dimethylimidazolidin-2-ylidene) Phosphoramidate linkage
  modified_base order(2..20,21..31): mod_base = OTHER; note = Phosphorothioate linkage
  modified_base 20^21: mod_base = OTHER; note = Methylphosphonate linkage
  misc_feature 1..32: note = RM109083

SEQ ID NO: 309 - DNA, 32 bp, synthetic construct; identical to SEQ ID NO: 189
  source 1..32: mol_type = other DNA
  misc_feature 16..17: note = DNA
  misc_feature order(1..15,18..32): note = RNA
  modified_base 15: mod_base = OTHER; note = 2-Prime-O-Methoxyethyl modified 5-methyl Cytidine
  modified_base 16: mod_base = OTHER; note = DNA nucleotide carrying a 6-amino-5-nitro-3-yl-2(1H)-pyridone nucleobase
  modified_base 17: mod_base = OTHER; note = DNA nucleotide carrying a hypoxanthine nucleobase
  modified_base order(13,19,23..24,28..29): mod_base = OTHER; note = 2-Prime-Fluoro modified nucleoside
  modified_base order(1..12,14,18,20..22,25..27,30..32): mod_base = OTHER; note = 2-Prime-O-Methyl modified nucleoside
  modified_base order(1^2,31^32): mod_base = OTHER; note = (1,3-dimethylimidazolidin-2-ylidene) Phosphoramidate linkage
  modified_base order(2..17,18..31): mod_base = OTHER; note = Phosphorothioate linkage
  modified_base 17^18: mod_base = OTHER; note = Methylphosphonate linkage
  misc_feature 1..32: note = RM109084

SEQ ID NO: 310 - DNA, 32 bp, synthetic construct; identical to SEQ ID NO: 190
  source 1..32: mol_type = other DNA
  misc_feature 13..14: note = DNA
  misc_feature order(1..12,15..32): note = RNA
  modified_base 12: mod_base = OTHER; note = 2-Prime-O-Methoxyethyl modified 5-methyl Cytidine
  modified_base 13: mod_base = OTHER; note = DNA nucleotide carrying a 6-amino-5-nitro-3-yl-2(1H)-pyridone nucleobase
  modified_base 14: mod_base = OTHER; note = DNA nucleotide carrying a hypoxanthine nucleobase
  modified_base order(10,16,20..21,25..26): mod_base = OTHER; note = 2-Prime-Fluoro modified nucleoside
  modified_base order(1..9,11,15,17..19,22..24,27..32): mod_base = OTHER; note = 2-Prime-O-Methyl modified nucleoside
  modified_base order(1^2,31^32): mod_base = OTHER; note = (1,3-dimethylimidazolidin-2-ylidene) Phosphoramidate linkage
  modified_base order(2..14,15..31): mod_base = OTHER; note = Phosphorothioate linkage
  modified_base 14^15: mod_base = OTHER; note = Methylphosphonate linkage
  misc_feature 1..32: note = RM109085

SEQ ID NO: 311 - DNA, 32 bp, synthetic construct; identical to SEQ ID NO: 191
  source 1..32: mol_type = other DNA
  misc_feature 10..11: note = DNA
  misc_feature order(1..9,12..32): note = RNA
  modified_base 9: mod_base = OTHER; note = 2-Prime-O-Methoxyethyl modified 5-methyl Cytidine
  modified_base 10: mod_base = OTHER; note = DNA nucleotide carrying a 6-amino-5-nitro-3-yl-2(1H)-pyridone nucleobase
  modified_base 11: mod_base = OTHER; note = DNA nucleotide carrying a hypoxanthine nucleobase
  modified_base order(7,13,17..18,22..23): mod_base = OTHER; note = 2-Prime-Fluoro modified nucleoside
  modified_base order(1..6,8,12,14..16,19..21,24..32): mod_base = OTHER; note = 2-Prime-O-Methyl modified nucleoside
  modified_base order(1^2,31^32): mod_base = OTHER; note = (1,3-dimethylimidazolidin-2-ylidene) Phosphoramidate linkage
  modified_base order(2..11,12..31): mod_base = OTHER; note = Phosphorothioate linkage
  modified_base 11^12: mod_base = OTHER; note = Methylphosphonate linkage
  misc_feature 1..32: note = RM109086

SEQ ID NO: 312 - DNA, 32 bp, synthetic construct; identical to SEQ ID NO: 192
  source 1..32: mol_type = other DNA
  misc_feature 7..8: note = DNA
  misc_feature order(1..6,9..32): note = RNA
  modified_base 6: mod_base = OTHER; note = 2-Prime-O-Methoxyethyl modified 5-methyl Cytidine
  modified_base 7: mod_base = OTHER; note = DNA nucleotide carrying a 6-amino-5-nitro-3-yl-2(1H)-pyridone nucleobase
  modified_base 8: mod_base = OTHER; note = DNA nucleotide carrying a hypoxanthine nucleobase
  modified_base order(4,10,14..15,19..20): mod_base = OTHER; note = 2-Prime-Fluoro modified nucleoside
  modified_base order(1..3,5,9,11..13,16..18,21..32): mod_base = OTHER; note = 2-Prime-O-Methyl modified nucleoside
  modified_base order(1^2,31^32): mod_base = OTHER; note = (1,3-dimethylimidazolidin-2-ylidene) Phosphoramidate linkage
  modified_base order(2..8,9..31): mod_base = OTHER; note = Phosphorothioate linkage
  modified_base 8^9: mod_base = OTHER; note = Methylphosphonate linkage
  misc_feature 1..32: note = RM109087

SEQ ID NO: 313 - DNA, 32 bp, synthetic construct; identical to SEQ ID NO: 185
  source 1..32: mol_type = other DNA
  misc_feature 28..29: note = DNA
  misc_feature order(1..27,30..32): note = RNA
  modified_base 27: mod_base = OTHER; note = 2-Prime-O-Methoxyethyl modified 5-methyl Cytidine
  modified_base 28: mod_base = OTHER; note = DNA nucleotide carrying a 6-amino-5-nitro-3-yl-2(1H)-pyridone nucleobase
  modified_base 29: mod_base = OTHER; note = DNA nucleotide carrying a hypoxanthine nucleobase
  modified_base order(22..23,31): mod_base = OTHER; note = 2-Prime-Fluoro modified nucleoside
  modified_base order(1..21,24..26,30,32): mod_base = OTHER; note = 2-Prime-O-Methyl modified nucleoside
  modified_base order(1^2,31^32): mod_base = OTHER; note = (1,3-dimethylimidazolidin-2-ylidene) Phosphoramidate linkage
  modified_base order(2..29,30^31): mod_base = OTHER; note = Phosphorothioate linkage
  modified_base 29^30: mod_base = OTHER; note = Methylphosphonate linkage
  misc_feature 1..32: note = RM109088

SEQ ID NO: 314 - DNA, 32 bp, synthetic construct; identical to SEQ ID NO: 186
  source 1..32: mol_type = other DNA
  misc_feature 25..26: note = DNA
  misc_feature order(1..24,27..32): note = RNA
  modified_base 24: mod_base = OTHER; note = 2-Prime-O-Methoxyethyl modified 5-methyl Cytidine
  modified_base 25: mod_base = OTHER; note = DNA nucleotide carrying a 6-amino-5-nitro-3-yl-2(1H)-pyridone nucleobase
  modified_base 26: mod_base = OTHER; note = DNA nucleotide carrying a hypoxanthine nucleobase
  modified_base order(19..20,28): mod_base = OTHER; note = 2-Prime-Fluoro modified nucleoside
  modified_base order(1..18,21..23,27,29..32): mod_base = OTHER; note = 2-Prime-O-Methyl modified nucleoside
  modified_base order(1^2,31^32): mod_base = OTHER; note = (1,3-dimethylimidazolidin-2-ylidene) Phosphoramidate linkage
  modified_base order(2..26,27..31): mod_base = OTHER; note = Phosphorothioate linkage
  modified_base 26^27: mod_base = OTHER; note = Methylphosphonate linkage
  misc_feature 1..32: note = RM109089

SEQ ID NO: 315 - DNA, 32 bp, synthetic construct; identical to SEQ ID NO: 187
  source 1..32: mol_type = other DNA
  misc_feature 22..23: note = DNA
  misc_feature order(1..21,24..32): note = RNA
  modified_base 21: mod_base = OTHER; note = 2-Prime-O-Methoxyethyl modified 5-methyl Cytidine
  modified_base 22: mod_base = OTHER; note = DNA nucleotide carrying a 6-amino-5-nitro-3-yl-2(1H)-pyridone nucleobase
  modified_base 23: mod_base = OTHER; note = DNA nucleotide carrying a hypoxanthine nucleobase
  modified_base order(16..17,25): mod_base = OTHER; note = 2-Prime-Fluoro modified nucleoside
  modified_base order(1..15,18..20,24,26..32): mod_base = OTHER; note = 2-Prime-O-Methyl modified nucleoside
  modified_base order(1^2,31^32): mod_base = OTHER; note = (1,3-dimethylimidazolidin-2-ylidene) Phosphoramidate linkage
  modified_base order(2..23,24..31): mod_base = OTHER; note = Phosphorothioate linkage
  modified_base 23^24: mod_base = OTHER; note = Methylphosphonate linkage
  misc_feature 1..32: note = RM109090

SEQ ID NO: 316 - DNA, 32 bp, synthetic construct; identical to SEQ ID NO: 5
  source 1..32: mol_type = other DNA
  misc_feature 19..20: note = DNA
  misc_feature order(1..18,21..32): note = RNA
  modified_base 18: mod_base = OTHER; note = 2-Prime-O-Methoxyethyl modified 5-methyl Cytidine
  modified_base 19: mod_base = OTHER; note = DNA nucleotide carrying a 6-amino-5-nitro-3-yl-2(1H)-pyridone nucleobase
  modified_base 20: mod_base = OTHER; note = DNA nucleotide carrying a hypoxanthine nucleobase
  modified_base order(13..14,22): mod_base = OTHER; note = 2-Prime-Fluoro modified nucleoside
  modified_base order(1..12,15..17,21,23..32): mod_base = OTHER; note = 2-Prime-O-Methyl modified nucleoside
  modified_base order(1^2,31^32): mod_base = OTHER; note = (1,3-dimethylimidazolidin-2-ylidene) Phosphoramidate linkage
  modified_base order(2..20,21..31): mod_base = OTHER; note = Phosphorothioate linkage
  modified_base 20^21: mod_base = OTHER; note = Methylphosphonate linkage
  misc_feature 1..32: note = RM109091

SEQ ID NO: 317 - DNA, 32 bp, synthetic construct; identical to SEQ ID NO: 189
  source 1..32: mol_type = other DNA
  misc_feature 16..17: note = DNA
  misc_feature order(1..15,18..32): note = RNA
  modified_base 15: mod_base = OTHER; note = 2-Prime-O-Methoxyethyl modified 5-methyl Cytidine
  modified_base 16: mod_base = OTHER; note = DNA nucleotide carrying a 6-amino-5-nitro-3-yl-2(1H)-pyridone nucleobase
  modified_base 17: mod_base = OTHER; note = DNA nucleotide carrying a hypoxanthine nucleobase
  modified_base order(10..11,19): mod_base = OTHER; note = 2-Prime-Fluoro modified nucleoside
  modified_base order(1..9,12..14,18,20..32): mod_base = OTHER; note = 2-Prime-O-Methyl modified nucleoside
  modified_base order(1^2,31^32): mod_base = OTHER; note = (1,3-dimethylimidazolidin-2-ylidene) Phosphoramidate linkage
  modified_base order(2..17,18..31): mod_base = OTHER; note = Phosphorothioate linkage
  modified_base 17^18: mod_base = OTHER; note = Methylphosphonate linkage
  misc_feature 1..32: note = RM109092

SEQ ID NO: 318 - DNA, 32 bp, synthetic construct; identical to SEQ ID NO: 190
  source 1..32: mol_type = other DNA
  misc_feature 13..14: note = DNA
  misc_feature order(1..12,15..32): note = RNA
  modified_base 12: mod_base = OTHER; note = 2-Prime-O-Methoxyethyl modified 5-methyl Cytidine
  modified_base 13: mod_base = OTHER; note = DNA nucleotide carrying a 6-amino-5-nitro-3-yl-2(1H)-pyridone nucleobase
  modified_base 14: mod_base = OTHER; note = DNA nucleotide carrying a hypoxanthine nucleobase
  modified_base order(7..8,16): mod_base = OTHER; note = 2-Prime-Fluoro modified nucleoside
  modified_base order(1..6,9..11,15,17..32): mod_base = OTHER; note = 2-Prime-O-Methyl modified nucleoside
  modified_base order(1^2,31^32): mod_base = OTHER; note = (1,3-dimethylimidazolidin-2-ylidene) Phosphoramidate linkage
  modified_base order(2..14,15..31): mod_base = OTHER; note = Phosphorothioate linkage
  modified_base 14^15: mod_base = OTHER; note = Methylphosphonate linkage
  misc_feature 1..32: note = RM109093

SEQ ID NO: 319 - DNA, 32 bp, synthetic construct; identical to SEQ ID NO: 191
  source 1..32: mol_type = other DNA
  misc_feature 10..11: note = DNA
  misc_feature order(1..9,12..32): note = RNA
  modified_base 9: mod_base = OTHER; note = 2-Prime-O-Methoxyethyl modified 5-methyl Cytidine
  modified_base 10: mod_base = OTHER; note = DNA nucleotide carrying a 6-amino-5-nitro-3-yl-2(1H)-pyridone nucleobase
  modified_base 11: mod_base = OTHER; note = DNA nucleotide carrying a hypoxanthine nucleobase
  modified_base order(4..5,13): mod_base = OTHER; note = 2-Prime-Fluoro modified nucleoside
  modified_base order(1..3,6..8,12,14..32): mod_base = OTHER; note = 2-Prime-O-Methyl modified nucleoside
  modified_base order(1^2,31^32): mod_base = OTHER; note = (1,3-dimethylimidazolidin-2-ylidene) Phosphoramidate linkage
  modified_base order(2..11,12..31): mod_base = OTHER; note = Phosphorothioate linkage
  modified_base 11^12: mod_base = OTHER; note = Methylphosphonate linkage
  misc_feature 1..32: note = RM109094

SEQ ID NO: 320 - DNA, 32 bp, synthetic construct; identical to SEQ ID NO: 192
  source 1..32: mol_type = other DNA
  misc_feature 7..8: note = DNA
  misc_feature order(1..6,9..32): note = RNA
  modified_base 6: mod_base = OTHER; note = 2-Prime-O-Methoxyethyl modified 5-methyl Cytidine
  modified_base 7: mod_base = OTHER; note = DNA nucleotide carrying a 6-amino-5-nitro-3-yl-2(1H)-pyridone nucleobase
  modified_base 8: mod_base = OTHER; note = DNA nucleotide carrying a hypoxanthine nucleobase
  modified_base order(1..2,10): mod_base = OTHER; note = 2-Prime-Fluoro modified nucleoside
  modified_base order(3..5,9,11..32): mod_base = OTHER; note = 2-Prime-O-Methyl modified nucleoside
  modified_base order(1^2,31^32): mod_base = OTHER; note = (1,3-dimethylimidazolidin-2-ylidene) Phosphoramidate linkage
  modified_base order(2..8,9..31): mod_base = OTHER; note = Phosphorothioate linkage
  modified_base 8^9: mod_base = OTHER; note = Methylphosphonate linkage
  misc_feature 1..32: note = RM109095

SEQ ID NO: 321 - DNA, 26 bp, synthetic construct
  source 1..26: mol_type = other DNA
  misc_feature 22..23: note = DNA
  misc_feature order(1..21,24..26): note = RNA
  modified_base 21: mod_base = OTHER; note = 2-Prime-O-Methoxyethyl modified 5-methyl Cytidine
  modified_base 22: mod_base = OTHER; note = DNA nucleotide carrying a 6-amino-5-nitro-3-yl-2(1H)-pyridone nucleobase
  modified_base 23: mod_base = OTHER; note = DNA nucleotide carrying a hypoxanthine nucleobase
  modified_base order(1,3,9,12,14,20,25): mod_base = OTHER; note = 2-Prime-Fluoro modified nucleoside
  modified_base order(2,4..8,10..11,13,15..19,24,26): mod_base = OTHER; note = 2-Prime-O-Methyl modified nucleoside
  modified_base order(1^2,25^26): mod_base = OTHER; note = (1,3-dimethylimidazolidin-2-ylidene) Phosphoramidate linkage
  modified_base order(2..23,24^25): mod_base = OTHER; note = Phosphorothioate linkage
  modified_base 23^24: mod_base = OTHER; note = Methylphosphonate linkage
  misc_feature 1..26: note = RM109096
gtgaggggcatgatgccatacnntgc

SEQ ID NO: 322 - DNA, 26 bp, synthetic construct
  source 1..26: mol_type = other DNA
  misc_feature 22..23: note = DNA
  misc_feature order(1..21,24..26): note = RNA
  modified_base 21: mod_base = OTHER; note = 2-Prime-O-Methoxyethyl modified 5-methyl Cytidine
  modified_base 22: mod_base = OTHER; note = DNA nucleotide carrying a 6-amino-5-nitro-3-yl-2(1H)-pyridone nucleobase
  modified_base 23: mod_base = OTHER; note = DNA nucleotide carrying a hypoxanthine nucleobase
  modified_base order(9,12,14,20,25): mod_base = OTHER; note = 2-Prime-Fluoro modified nucleoside
  modified_base order(1..8,10..11,13,15..19,24,26): mod_base = OTHER; note = 2-Prime-O-Methyl modified nucleoside
  modified_base order(1^2,25^26): mod_base = OTHER; note = (1,3-dimethylimidazolidin-2-ylidene) Phosphoramidate linkage
  modified_base order(2..23,24^25): mod_base = OTHER; note = Phosphorothioate linkage
  modified_base 23^24: mod_base = OTHER; note = Methylphosphonate linkage
  misc_feature 1..26: note = RM109097
gtgaggggcatgatgccatacnntgc

SEQ ID NO: 323 - DNA, 26 bp, synthetic construct
  source 1..26: mol_type = other DNA
  misc_feature 19..20: note = DNA
  misc_feature order(1..18,21..26): note = RNA
  modified_base 18: mod_base = OTHER; note = 2-Prime-O-Methoxyethyl modified 5-methyl Cytidine
  modified_base 19: mod_base = OTHER; note = DNA nucleotide carrying a 6-amino-5-nitro-3-yl-2(1H)-pyridone nucleobase
  modified_base 20: mod_base = OTHER; note = DNA nucleotide carrying a hypoxanthine nucleobase
  modified_base order(6,9,11,17,22): mod_base = OTHER; note = 2-Prime-Fluoro modified nucleoside
  modified_base order(1..5,7..8,10,12..16,21,23..26): mod_base = OTHER; note = 2-Prime-O-Methyl modified nucleoside
  modified_base order(1^2,25^26): mod_base = OTHER; note = (1,3-dimethylimidazolidin-2-ylidene) Phosphoramidate linkage
  modified_base order(2..20,21..25): mod_base = OTHER; note = Phosphorothioate linkage
  modified_base 20^21: mod_base = OTHER; note = Methylphosphonate linkage
  misc_feature 1..26: note = RM109098
aggggcatgatgccatacnntgccac

SEQ ID NO: 324 - DNA, 26 bp, synthetic construct
  source 1..26: mol_type = other DNA
  misc_feature 16..17: note = DNA
  misc_feature order(1..15,18..26): note = RNA
  modified_base 15: mod_base = OTHER; note = 2-Prime-O-Methoxyethyl modified 5-methyl Cytidine
  modified_base 16: mod_base = OTHER; note = DNA nucleotide carrying a 6-amino-5-nitro-3-yl-2(1H)-pyridone nucleobase
  modified_base 17: mod_base = OTHER; note = DNA nucleotide carrying a hypoxanthine nucleobase
  modified_base order(3,6,8,14,19): mod_base = OTHER; note = 2-Prime-Fluoro modified nucleoside
  modified_base order(1..2,4..5,7,9..13,18,20..26): mod_base = OTHER; note = 2-Prime-O-Methyl modified nucleoside
  modified_base order(1^2,25^26): mod_base = OTHER; note = (1,3-dimethylimidazolidin-2-ylidene) Phosphoramidate linkage
  modified_base order(2..17,18..25): mod_base = OTHER; note = Phosphorothioate linkage
  modified_base 17^18: mod_base = OTHER; note = Methylphosphonate linkage
  misc_feature 1..26: note = RM109099
ggcatgatgccatacnntgccaccag

SEQ ID NO: 325 - DNA, 29 bp, synthetic construct
  source 1..29: mol_type = other DNA
  misc_feature 24..25: note = DNA
  misc_feature order(1..23,26..29): note = RNA
  modified_base 23: mod_base = OTHER; note = 2-Prime-O-Methoxyethyl modified 5-methyl Cytidine
  modified_base 24: mod_base = OTHER; note = DNA nucleotide carrying a 6-amino-5-nitro-3-yl-2(1H)-pyridone nucleobase
  modified_base 25: mod_base = OTHER; note = DNA nucleotide carrying a hypoxanthine nucleobase
  modified_base order(11,14,16,22,27): mod_base = OTHER; note = 2-Prime-Fluoro modified nucleoside
  modified_base order(1..10,12..13,15,17..21,26,28..29): mod_base = OTHER; note = 2-Prime-O-Methyl modified nucleoside
  modified_base order(1^2,28^29): mod_base = OTHER; note = (1,3-dimethylimidazolidin-2-ylidene) Phosphoramidate linkage
  modified_base order(2..25,26..28): mod_base = OTHER; note = Phosphorothioate linkage
  modified_base 25^26: mod_base = OTHER; note = Methylphosphonate linkage
  misc_feature 1..29: note = RM109100
ccgtgaggggcatgatgccatacnntgcc

SEQ ID NO: 326 - DNA, 29 bp, synthetic construct
  source 1..29: mol_type = other DNA
  misc_feature 21..22: note = DNA
  misc_feature order(1..20,23..29): note = RNA
  modified_base 20: mod_base = OTHER; note = 2-Prime-O-Methoxyethyl modified 5-methyl Cytidine
  modified_base 21: mod_base = OTHER; note = DNA nucleotide carrying a 6-amino-5-nitro-3-yl-2(1H)-pyridone nucleobase
  modified_base 22: mod_base = OTHER; note = DNA nucleotide carrying a hypoxanthine nucleobase
  modified_base order(8,11,13,19,24): mod_base = OTHER; note = 2-Prime-Fluoro modified nucleoside
  modified_base order(1..7,9..10,12,14..18,23,25..29): mod_base = OTHER; note = 2-Prime-O-Methyl modified nucleoside
  modified_base order(1^2,28^29): mod_base = OTHER; note = (1,3-dimethylimidazolidin-2-ylidene) Phosphoramidate linkage
  modified_base order(2..22,23..28): mod_base = OTHER; note = Phosphorothioate linkage
  modified_base 22^23: mod_base = OTHER; note = Methylphosphonate linkage
  misc_feature 1..29: note = RM109101
tgaggggcatgatgccatacnntgccacc

SEQ ID NO: 327 - DNA, 29 bp, synthetic construct
  source 1..29: mol_type = other DNA
  misc_feature 18..19: note = DNA
  misc_feature order(1..17,20..29): note = RNA
  modified_base 17: mod_base = OTHER; note = 2-Prime-O-Methoxyethyl modified 5-methyl Cytidine
  modified_base 18: mod_base = OTHER; note = DNA nucleotide carrying a 6-amino-5-nitro-3-yl-2(1H)-pyridone nucleobase
  modified_base 19: mod_base = OTHER; note = DNA nucleotide carrying a hypoxanthine nucleobase
  modified_base order(5,8,10,16,21): mod_base = OTHER; note = 2-Prime-Fluoro modified nucleoside
  modified_base order(1..4,6..7,9,11..15,20,22..29): mod_base = OTHER; note = 2-Prime-O-Methyl modified nucleoside
  modified_base order(1^2,28^29): mod_base = OTHER; note = (1,3-dimethylimidazolidin-2-ylidene) Phosphoramidate linkage
  modified_base order(2..19,20..28): mod_base = OTHER; note = Phosphorothioate linkage
  modified_base 19^20: mod_base = OTHER; note = Methylphosphonate linkage
  misc_feature 1..29: note = RM109102
ggggcatgatgccatacnntgccaccagg

SEQ ID NO: 328 - DNA, 29 bp, synthetic construct
  source 1..29: mol_type = other DNA
  misc_feature 15..16: note = DNA
  misc_feature order(1..14,17..29): note = RNA
  modified_base 14: mod_base = OTHER; note = 2-Prime-O-Methoxyethyl modified 5-methyl Cytidine
  modified_base 15: mod_base = OTHER; note = DNA nucleotide carrying a 6-amino-5-nitro-3-yl-2(1H)-pyridone nucleobase
  modified_base 16: mod_base = OTHER; note = DNA nucleotide carrying a hypoxanthine nucleobase
  modified_base order(2,5,7,13,18): mod_base = OTHER; note = 2-Prime-Fluoro modified nucleoside
  modified_base order(1,3..4,6,8..12,17,19..29): mod_base = OTHER; note = 2-Prime-O-Methyl modified nucleoside
  modified_base order(1^2,28^29): mod_base = OTHER; note = (1,3-dimethylimidazolidin-2-ylidene) Phosphoramidate linkage
  modified_base order(2..16,17..28): mod_base = OTHER; note = Phosphorothioate linkage
  modified_base 16^17: mod_base = OTHER; note = Methylphosphonate linkage
  misc_feature 1..29: note = RM109103
gcatgatgccatacnntgccaccagggcg

SEQ ID NO: 329 - DNA, 32 bp, synthetic construct; identical to SEQ ID NO: 186
  source 1..32: mol_type = other DNA
  misc_feature 25..26: note = DNA
  misc_feature order(1..24,27..32): note = RNA
  modified_base 24: mod_base = OTHER; note = 2-Prime-O-Methoxyethyl modified 5-methyl Cytidine
  modified_base 25: mod_base = OTHER; note = DNA nucleotide carrying a 6-amino-5-nitro-3-yl-2(1H)-pyridone nucleobase
  modified_base 26: mod_base = OTHER; note = DNA nucleotide carrying a hypoxanthine nucleobase
  modified_base order(2,11,16,20,22..23,28..30): mod_base = OTHER; note = 2-Prime-Fluoro modified nucleoside
  modified_base order(1,3..10,12..15,17..19,21,27,31..32): mod_base = OTHER; note = 2-Prime-O-Methyl modified nucleoside
  modified_base order(1^2,31^32): mod_base = OTHER; note = (1,3-dimethylimidazolidin-2-ylidene) Phosphoramidate linkage
  modified_base order(2..26,27..31): mod_base = OTHER; note = Phosphorothioate linkage
  modified_base 26^27: mod_base = OTHER; note = Methylphosphonate linkage
  misc_feature 1..32: note = RM109104

SEQ ID NO: 330 - DNA, 32 bp, synthetic construct; identical to SEQ ID NO: 192
  source 1..32: mol_type = other DNA
  misc_feature 7..8: note = DNA
  misc_feature order(1..6,9..32): note = RNA
  modified_base 6: mod_base = OTHER; note = 2-Prime-O-Methoxyethyl modified 5-methyl Cytidine
  modified_base 7: mod_base = OTHER; note = DNA nucleotide carrying a 6-amino-5-nitro-3-yl-2(1H)-pyridone nucleobase
  modified_base 8: mod_base = OTHER; note = DNA nucleotide carrying a hypoxanthine nucleobase
  modified_base order(4..5,10..12,14,18,23,32): mod_base = OTHER; note = 2-Prime-Fluoro modified nucleoside
  modified_base order(1..3,9,13,15..17,19..22,24..31): mod_base = OTHER; note = 2-Prime-O-Methyl modified nucleoside
  modified_base order(1^2,31^32): mod_base = OTHER; note = (1,3-dimethylimidazolidin-2-ylidene) Phosphoramidate linkage
  modified_base order(2..8,9..31): mod_base = OTHER; note = Phosphorothioate linkage
  modified_base 8^9: mod_base = OTHER; note = Methylphosphonate linkage
  misc_feature 1..32: note = RM109105

SEQ ID NO: 331 - DNA, 23 bp, synthetic construct
  source 1..23: mol_type = other DNA
  misc_feature 18..19: note = DNA
  misc_feature order(1..17,20..23): note = RNA
  modified_base 17: mod_base = OTHER; note = 2-Prime-O-Methoxyethyl modified 5-methyl Cytidine
  modified_base 18: mod_base = OTHER; note = DNA nucleotide carrying a 6-amino-5-nitro-3-yl-2(1H)-pyridone nucleobase
  modified_base 19: mod_base = OTHER; note = DNA nucleotide carrying a hypoxanthine nucleobase
  modified_base order(13,15..16,21..23): mod_base = OTHER; note = 2-Prime-Fluoro modified nucleoside
  modified_base order(1..12,14,20): mod_base = OTHER; note = 2-Prime-O-Methyl modified nucleoside
  modified_base order(1^2,22^23): mod_base = OTHER; note = (1,3-dimethylimidazolidin-2-ylidene) Phosphoramidate linkage
  modified_base order(2..19,20..22): mod_base = OTHER; note = Phosphorothioate linkage
  modified_base 19^20: mod_base = OTHER; note = Methylphosphonate linkage
  misc_feature 1..23: note = RM109106
ggggcatgatgccatacnntgcc

SEQ ID NO: 332 - DNA, 23 bp, synthetic construct
  source 1..23: mol_type = other DNA
  misc_feature 15..16: note = DNA
  misc_feature order(1..14,17..23): note = RNA
  modified_base 14: mod_base = OTHER; note = 2-Prime-O-Methoxyethyl modified 5-methyl Cytidine
  modified_base 15: mod_base = OTHER; note = DNA nucleotide carrying a 6-amino-5-nitro-3-yl-2(1H)-pyridone nucleobase
  modified_base 16: mod_base = OTHER; note = DNA nucleotide carrying a hypoxanthine nucleobase
  modified_base order(10,12..13,18..20): mod_base = OTHER; note = 2-Prime-Fluoro modified nucleoside
  modified_base order(1..9,11,17,21..23): mod_base = OTHER; note = 2-Prime-O-Methyl modified nucleoside
  modified_base order(1^2,22^23): mod_base = OTHER; note = (1,3-dimethylimidazolidin-2-ylidene) Phosphoramidate linkage
  modified_base order(2..16,17..22): mod_base = OTHER; note = Phosphorothioate linkage
  modified_base 16^17: mod_base = OTHER; note = Methylphosphonate linkage
  misc_feature 1..23: note = RM109107
gcatgatgccatacnntgccacc

SEQ ID NO: 333 - DNA, 23 bp, synthetic construct
  source 1..23: mol_type = other DNA
  misc_feature 12..13: note = DNA
  misc_feature order(1..11,14..23): note = RNA
  modified_base 11: mod_base = OTHER; note = 2-Prime-O-Methoxyethyl modified 5-methyl Cytidine
  modified_base 12: mod_base = OTHER; note = DNA nucleotide carrying a 6-amino-5-nitro-3-yl-2(1H)-pyridone nucleobase
  modified_base 13: mod_base = OTHER; note = DNA nucleotide carrying a hypoxanthine nucleobase
  modified_base order(7,9..10,15..17): mod_base = OTHER; note = 2-Prime-Fluoro modified nucleoside
  modified_base order(1..6,8,14,18..23): mod_base = OTHER; note = 2-Prime-O-Methyl modified nucleoside
  modified_base order(1^2,22^23): mod_base = OTHER; note = (1,3-dimethylimidazolidin-2-ylidene) Phosphoramidate linkage
  modified_base order(2..13,14..22): mod_base = OTHER; note = Phosphorothioate linkage
  modified_base 13^14: mod_base = OTHER; note = Methylphosphonate linkage
  misc_feature 1..23: note = RM109108
tgatgccatacnntgccaccagg

SEQ ID NO: 334 - DNA, 23 bp, synthetic construct
  source 1..23: mol_type = other DNA
  misc_feature 9..10: note = DNA
  misc_feature order(1..8,11..23): note = RNA
  modified_base 8: mod_base = OTHER; note = 2-Prime-O-Methoxyethyl modified 5-methyl Cytidine
  modified_base 9: mod_base = OTHER; note = DNA nucleotide carrying a 6-amino-5-nitro-3-yl-2(1H)-pyridone nucleobase
  modified_base 10: mod_base = OTHER; note = DNA nucleotide carrying a hypoxanthine nucleobase
  modified_base order(4,6..7,12..14): mod_base = OTHER; note = 2-Prime-Fluoro modified nucleoside
  modified_base order(1..3,5,11,15..23): mod_base = OTHER; note = 2-Prime-O-Methyl modified nucleoside
  modified_base order(1^2,22^23): mod_base = OTHER; note = (1,3-dimethylimidazolidin-2-ylidene) Phosphoramidate linkage
  modified_base order(2..10,11..22): mod_base = OTHER; note = Phosphorothioate linkage
  modified_base 10^11: mod_base = OTHER; note = Methylphosphonate linkage
  misc_feature 1..23: note = RM109109
tgccatacnntgccaccagggcg

SEQ ID NO: 335 - DNA, 23 bp, synthetic construct
  source 1..23: mol_type = other DNA
  misc_feature 6..7: note = DNA
  misc_feature order(1..5,8..23): note = RNA
  modified_base 5: mod_base = OTHER; note = 2-Prime-O-Methoxyethyl modified 5-methyl Cytidine
  modified_base 6: mod_base = OTHER; note = DNA nucleotide carrying a 6-amino-5-nitro-3-yl-2(1H)-pyridone nucleobase
  modified_base 7: mod_base = OTHER; note = DNA nucleotide carrying a hypoxanthine nucleobase
  modified_base order(1,3..4,9..11): mod_base = OTHER; note = 2-Prime-Fluoro modified nucleoside
  modified_base order(2,8,12..23): mod_base = OTHER; note = 2-Prime-O-Methyl modified nucleoside
  modified_base order(1^2,22^23): mod_base = OTHER; note = (1,3-dimethylimidazolidin-2-ylidene) Phosphoramidate linkage
  modified_base order(2..7,8..22): mod_base = OTHER; note = Phosphorothioate linkage
  modified_base 7^8: mod_base = OTHER; note = Methylphosphonate linkage
  misc_feature 1..23: note = RM109110
catacnntgccaccagggcgatg

SEQ ID NO: 336 - DNA, 32 bp, synthetic construct; identical to SEQ ID NO: 186
  source 1..32: mol_type = other DNA
  misc_feature 25..26: note = DNA
  misc_feature order(1..24,27..32): note = RNA
  modified_base 24: mod_base = OTHER; note = 2-Prime-O-Methoxyethyl modified 5-methyl Cytidine
  modified_base 25: mod_base = OTHER; note = DNA nucleotide carrying a 6-amino-5-nitro-3-yl-2(1H)-pyridone nucleobase
  modified_base 26: mod_base = OTHER; note = DNA nucleotide carrying a hypoxanthine nucleobase
  modified_base order(20,22..23,28..30): mod_base = OTHER; note = 2-Prime-Fluoro modified nucleoside
  modified_base order(1..19,21,27,31..32): mod_base = OTHER; note = 2-Prime-O-Methyl modified nucleoside
  modified_base order(1^2,31^32): mod_base = OTHER; note = (1,3-dimethylimidazolidin-2-ylidene) Phosphoramidate linkage
  modified_base order(2..26,27..31): mod_base = OTHER; note = Phosphorothioate linkage
  modified_base 26^27: mod_base = OTHER; note = Methylphosphonate linkage
  misc_feature 1..32: note = RM109111

SEQ ID NO: 337 - DNA, 32 bp, synthetic construct; identical to SEQ ID NO: 187
  source 1..32: mol_type = other DNA
  misc_feature 22..23: note = DNA
  misc_feature order(1..21,24..32): note = RNA
  modified_base 21: mod_base = OTHER; note = 2-Prime-O-Methoxyethyl modified 5-methyl Cytidine
  modified_base 22: mod_base = OTHER; note = DNA nucleotide carrying a 6-amino-5-nitro-3-yl-2(1H)-pyridone nucleobase
  modified_base 23: mod_base = OTHER; note = DNA nucleotide carrying a hypoxanthine nucleobase
  modified_base order(17,19..20,25..27): mod_base = OTHER; note = 2-Prime-Fluoro modified nucleoside
  modified_base order(1..16,18,24,28..32): mod_base = OTHER; note = 2-Prime-O-Methyl modified nucleoside
  modified_base order(1^2,31^32): mod_base = OTHER; note = (1,3-dimethylimidazolidin-2-ylidene) Phosphoramidate linkage
  modified_base order(2..23,24..31): mod_base = OTHER; note = Phosphorothioate linkage
  modified_base 23^24: mod_base = OTHER; note = Methylphosphonate linkage
  misc_feature 1..32: note = RM109112

SEQ ID NO: 338 - DNA, 32 bp, synthetic construct; identical to SEQ ID NO: 5
  source 1..32: mol_type = other DNA
  misc_feature 19..20: note = DNA
  misc_feature order(1..18,21..32): note = RNA
  modified_base 18: mod_base = OTHER; note = 2-Prime-O-Methoxyethyl modified 5-methyl Cytidine
  modified_base 19: mod_base = OTHER; note = DNA nucleotide carrying a 6-amino-5-nitro-3-yl-2(1H)-pyridone nucleobase
  modified_base 20: mod_base = OTHER; note = DNA nucleotide carrying a hypoxanthine nucleobase
  modified_base order(14,16..17,22..24): mod_base = OTHER; note = 2-Prime-Fluoro modified nucleoside
  modified_base order(1..13,15,21,25..32): mod_base = OTHER; note = 2-Prime-O-Methyl modified nucleoside
  modified_base order(1^2,31^32): mod_base = OTHER; note = (1,3-dimethylimidazolidin-2-ylidene) Phosphoramidate linkage
  modified_base order(2..20,21..31): mod_base = OTHER; note = Phosphorothioate linkage
  modified_base 20^21: mod_base = OTHER; note = Methylphosphonate linkage
  misc_feature 1..32: note = RM109113

SEQ ID NO: 339 - DNA, 32 bp, synthetic construct; identical to SEQ ID NO: 189
  source 1..32: mol_type = other DNA
  misc_feature 16..17: note = DNA
  misc_feature order(1..15,18..32): note = RNA
  modified_base 15: mod_base = OTHER; note = 2-Prime-O-Methoxyethyl modified 5-methyl Cytidine
  modified_base 16: mod_base = OTHER; note = DNA nucleotide carrying a 6-amino-5-nitro-3-yl-2(1H)-pyridone nucleobase
  modified_base 17: mod_base = OTHER; note = DNA nucleotide carrying a hypoxanthine nucleobase
  modified_base order(11,13..14,19..21): mod_base = OTHER; note = 2-Prime-Fluoro modified nucleoside
  modified_base order(1..10,12,18,22..32): mod_base = OTHER; note = 2-Prime-O-Methyl modified nucleoside
  modified_base order(1^2,31^32): mod_base = OTHER; note = (1,3-dimethylimidazolidin-2-ylidene) Phosphoramidate linkage
  modified_base order(2..17,18..31): mod_base = OTHER; note = Phosphorothioate linkage
  modified_base 17^18: mod_base = OTHER; note = Methylphosphonate linkage
  misc_feature 1..32: note = RM109114

SEQ ID NO: 340 - DNA, 32 bp, synthetic construct; identical to SEQ ID NO: 190
  source 1..32: mol_type = other DNA
  misc_feature 13..14: note = DNA
  misc_feature order(1..12,15..32): note = RNA
  modified_base 12: mod_base = OTHER; note = 2-Prime-O-Methoxyethyl modified 5-methyl Cytidine
  modified_base 13: mod_base = OTHER; note = DNA nucleotide carrying a 6-amino-5-nitro-3-yl-2(1H)-pyridone nucleobase
  modified_base 14: mod_base = OTHER; note = DNA nucleotide carrying a hypoxanthine nucleobase
  modified_base order(8,10..11,16..18): mod_base = OTHER; note = 2-Prime-Fluoro modified nucleoside
  modified_base order(1..7,9,15,19..32): mod_base = OTHER; note = 2-Prime-O-Methyl modified nucleoside
  modified_base order(1^2,31^32): mod_base = OTHER; note = (1,3-dimethylimidazolidin-2-ylidene) Phosphoramidate linkage
  modified_base order(2..14,15..31): mod_base = OTHER; note = Phosphorothioate linkage
  modified_base 14^15: mod_base = OTHER; note = Methylphosphonate linkage
  misc_feature 1..32: note = RM109115

SEQ ID NO: 341 - DNA, 32 bp, synthetic construct; identical to SEQ ID NO: 191
  source 1..32: mol_type = other DNA
  misc_feature 10..11: note = DNA
  misc_feature order(1..9,12..32): note = RNA
  modified_base 9: mod_base = OTHER; note = 2-Prime-O-Methoxyethyl modified 5-methyl Cytidine
  modified_base 10: mod_base = OTHER; note = DNA nucleotide carrying a 6-amino-5-nitro-3-yl-2(1H)-pyridone nucleobase
  modified_base 11: mod_base = OTHER; note = DNA nucleotide carrying a hypoxanthine nucleobase
  modified_base order(5,7..8,13..15): mod_base = OTHER; note = 2-Prime-Fluoro modified nucleoside
  modified_base order(1..4,6,12,16..32): mod_base = OTHER; note = 2-Prime-O-Methyl modified nucleoside
  modified_base order(1^2,31^32): mod_base = OTHER; note = (1,3-dimethylimidazolidin-2-ylidene) Phosphoramidate linkage
  modified_base order(2..11,12..31): mod_base = OTHER; note = Phosphorothioate linkage
  modified_base 11^12: mod_base = OTHER; note = Methylphosphonate linkage
  misc_feature 1..32: note = RM109116

SEQ ID NO: 342 - DNA, 32 bp, synthetic construct; identical to SEQ ID NO: 192
  source 1..32: mol_type = other DNA
  misc_feature 7..8: note = DNA
  misc_feature order(1..6,9..32): note = RNA
  modified_base 6: mod_base = OTHER; note = 2-Prime-O-Methoxyethyl modified 5-methyl Cytidine
  modified_base 7: mod_base = OTHER; note = DNA nucleotide carrying a 6-amino-5-nitro-3-yl-2(1H)-pyridone nucleobase
  modified_base 8: mod_base = OTHER; note = DNA nucleotide carrying a hypoxanthine nucleobase
  modified_base order(2,4..5,10..12): mod_base = OTHER; note = 2-Prime-Fluoro modified nucleoside
  modified_base order(1,3,9,13..32): mod_base = OTHER; note = 2-Prime-O-Methyl modified nucleoside
  modified_base order(1^2,31^32): mod_base = OTHER; note = (1,3-dimethylimidazolidin-2-ylidene) Phosphoramidate linkage
  modified_base order(2..8,9..31): mod_base = OTHER; note = Phosphorothioate linkage
  modified_base 8^9: mod_base = OTHER; note = Methylphosphonate linkage
  misc_feature 1..32: note = RM109117

SEQ ID NO: 343 - DNA, 23 bp, synthetic construct
  source 1..23: mol_type = other DNA
  misc_feature 15..16: note = DNA
  misc_feature order(1..14,17..23): note = RNA
  modified_base 14: mod_base = OTHER; note = 2-Prime-O-Methoxyethyl modified 5-methyl Cytidine
  modified_base 15: mod_base = OTHER; note = DNA nucleotide carrying a 6-amino-5-nitro-3-yl-2(1H)-pyridone nucleobase
  modified_base 16: mod_base = OTHER; note = DNA nucleotide carrying a hypoxanthine nucleobase
  modified_base order(12..13,18..20,22): mod_base = OTHER; note = 2-Prime-Fluoro modified nucleoside
  modified_base order(1..11,17,21,23): mod_base = OTHER; note = 2-Prime-O-Methyl modified nucleoside
  modified_base order(1^2,22^23): mod_base = OTHER; note = (1,3-dimethylimidazolidin-2-ylidene) Phosphoramidate linkage
  modified_base order(2..16,17..22): mod_base = OTHER; note = Phosphorothioate linkage
  modified_base 16^17: mod_base = OTHER; note = Methylphosphonate linkage
  misc_feature 1..23: note = RM109118
gcatgatgccatacnntgccacc

SEQ ID NO: 344 - DNA, 23 bp, synthetic construct
  source 1..23: mol_type = other DNA
  misc_feature 12..13: note = DNA
  misc_feature order(1..11,14..23): note = RNA
  modified_base 11: mod_base = OTHER; note = 2-Prime-O-Methoxyethyl modified 5-methyl Cytidine
  modified_base 12: mod_base = OTHER; note = DNA nucleotide carrying a 6-amino-5-nitro-3-yl-2(1H)-pyridone nucleobase
  modified_base 13: mod_base = OTHER; note = DNA nucleotide carrying a hypoxanthine nucleobase
  modified_base order(9..10,15..17,19): mod_base = OTHER; note = 2-Prime-Fluoro modified nucleoside
  modified_base order(1..8,14,18,20..23): mod_base = OTHER; note = 2-Prime-O-Methyl modified nucleoside
  modified_base order(1^2,22^23): mod_base = OTHER; note = (1,3-dimethylimidazolidin-2-ylidene) Phosphoramidate linkage
  modified_base order(2..13,14..22): mod_base = OTHER; note = Phosphorothioate linkage
  modified_base 13^14: mod_base = OTHER; note = Methylphosphonate linkage
  misc_feature 1..23: note = RM109119
tgatgccatacnntgccaccagg

SEQ ID NO: 345 - DNA, 23 bp, synthetic construct
  source 1..23: mol_type = other DNA
  misc_feature 9..10: note = DNA
  misc_feature order(1..8,11..23): note = RNA
  modified_base 8: mod_base = OTHER; note = 2-Prime-O-Methoxyethyl modified 5-methyl Cytidine
  modified_base 9: mod_base = OTHER; note = DNA nucleotide carrying a 6-amino-5-nitro-3-yl-2(1H)-pyridone nucleobase
  modified_base 10: mod_base = OTHER; note = DNA nucleotide carrying a hypoxanthine nucleobase
  modified_base order(6..7,12..14,16): mod_base = OTHER; note = 2-Prime-Fluoro modified nucleoside
  modified_base order(1..5,11,15,17..23): mod_base = OTHER; note = 2-Prime-O-Methyl modified nucleoside
  modified_base order(1^2,22^23): mod_base = OTHER; note = (1,3-dimethylimidazolidin-2-ylidene) Phosphoramidate linkage
  modified_base order(2..10,11..22): mod_base = OTHER; note = Phosphorothioate linkage
  modified_base 10^11: mod_base = OTHER; note = Methylphosphonate linkage
  misc_feature 1..23: note = RM109120
tgccatacnntgccaccagggcg

SEQ ID NO: 346 - DNA, 23 bp, synthetic construct
  source 1..23: mol_type = other DNA
  misc_feature 6..7: note = DNA
  misc_feature order(1..5,8..23): note = RNA
  modified_base 5: mod_base = OTHER; note = 2-Prime-O-Methoxyethyl modified 5-methyl Cytidine
  modified_base 6: mod_base = OTHER; note = DNA nucleotide carrying a 6-amino-5-nitro-3-yl-2(1H)-pyridone nucleobase
  modified_base 7: mod_base = OTHER; note = DNA nucleotide carrying a hypoxanthine nucleobase
  modified_base order(3..4,9..11,13): mod_base = OTHER; note = 2-Prime-Fluoro modified nucleoside
  modified_base order(1..2,8,12,14..23): mod_base = OTHER; note = 2-Prime-O-Methyl modified nucleoside
  modified_base order(1^2,22^23): mod_base = OTHER; note = (1,3-dimethylimidazolidin-2-ylidene) Phosphoramidate linkage
  modified_base order(2..7,8..22): mod_base = OTHER; note = Phosphorothioate linkage
  modified_base 7^8: mod_base = OTHER; note = Methylphosphonate linkage
  misc_feature 1..23: note = RM109121
catacnntgccaccagggcgatg

SEQ ID NO: 347 - DNA, 32 bp, synthetic construct; identical to SEQ ID NO: 186
  source 1..32: mol_type = other DNA
  misc_feature 25..26: note = DNA
  misc_feature order(1..24,27..32): note = RNA
  modified_base 24: mod_base = OTHER; note = 2-Prime-O-Methoxyethyl modified 5-methyl Cytidine
  modified_base 25: mod_base = OTHER; note = DNA nucleotide carrying a 6-amino-5-nitro-3-yl-2(1H)-pyridone nucleobase
  modified_base 26: mod_base = OTHER; note = DNA nucleotide carrying a hypoxanthine nucleobase
  modified_base order(22..23,28..30,32): mod_base = OTHER; note = 2-Prime-Fluoro modified nucleoside
  modified_base order(1..21,27,31): mod_base = OTHER; note = 2-Prime-O-Methyl modified nucleoside
  modified_base order(1^2,31^32): mod_base = OTHER; note = (1,3-dimethylimidazolidin-2-ylidene) Phosphoramidate linkage
  modified_base order(2..26,27..31): mod_base = OTHER; note = Phosphorothioate linkage
  modified_base 26^27: mod_base = OTHER; note = Methylphosphonate linkage
  misc_feature 1..32: note = RM109122

SEQ ID NO: 348 - DNA, 32 bp, synthetic construct; identical to SEQ ID NO: 187
  source 1..32: mol_type = other DNA
  misc_feature 22..23: note = DNA
  misc_feature order(1..21,24..32): note = RNA
  modified_base 21: mod_base = OTHER; note = 2-Prime-O-Methoxyethyl modified 5-methyl Cytidine
  modified_base 22: mod_base = OTHER; note = DNA nucleotide carrying a 6-amino-5-nitro-3-yl-2(1H)-pyridone nucleobase
  modified_base 23: mod_base = OTHER; note = DNA nucleotide carrying a hypoxanthine nucleobase
  modified_base order(19..20,25..27,29): mod_base = OTHER; note = 2-Prime-Fluoro modified nucleoside
  modified_base order(1..18,24,28,30..32): mod_base = OTHER; note = 2-Prime-O-Methyl modified nucleoside
  modified_base order(1^2,31^32): mod_base = OTHER; note = (1,3-dimethylimidazolidin-2-ylidene) Phosphoramidate linkage
  modified_base order(2..23,24..31): mod_base = OTHER; note = Phosphorothioate linkage
  modified_base 23^24: mod_base = OTHER; note = Methylphosphonate linkage
  misc_feature 1..32: note = RM109123

SEQ ID NO: 349 - DNA, 32 bp, synthetic construct; identical to SEQ ID NO: 5
  source 1..32: mol_type = other DNA
  misc_feature 19..20: note = DNA
  misc_feature order(1..18,21..32): note = RNA
  modified_base 18: mod_base = OTHER; note = 2-Prime-O-Methoxyethyl modified 5-methyl Cytidine
  modified_base 19: mod_base = OTHER; note = DNA nucleotide carrying a 6-amino-5-nitro-3-yl-2(1H)-pyridone nucleobase
  modified_base 20: mod_base = OTHER; note = DNA nucleotide carrying a hypoxanthine nucleobase
  modified_base order(16..17,22..24,26): mod_base = OTHER; note = 2-Prime-Fluoro modified nucleoside
  modified_base order(1..15,21,25,27..32): mod_base = OTHER; note = 2-Prime-O-Methyl modified nucleoside
  modified_base order(1^2,31^32): mod_base = OTHER; note = (1,3-dimethylimidazolidin-2-ylidene) Phosphoramidate linkage
  modified_base order(2..20,21..31): mod_base = OTHER; note = Phosphorothioate linkage
  modified_base 20^21: mod_base = OTHER; note = Methylphosphonate linkage
  misc_feature 1..32: note = RM109124

SEQ ID NO: 350 - DNA, 32 bp, synthetic construct; identical to SEQ ID NO: 189
  source 1..32: mol_type = other DNA
  misc_feature 16..17: note = DNA
  misc_feature order(1..15,18..32): note = RNA
  modified_base 15: mod_base = OTHER; note = 2-Prime-O-Methoxyethyl modified 5-methyl Cytidine
  modified_base 16: mod_base = OTHER; note = DNA nucleotide carrying a 6-amino-5-nitro-3-yl-2(1H)-pyridone nucleobase
  modified_base 17: mod_base = OTHER; note = DNA nucleotide carrying a hypoxanthine nucleobase
  modified_base order(13..14,19..21,23): mod_base = OTHER; note = 2-Prime-Fluoro modified nucleoside
  modified_base order(1..12,18,22,24..32): mod_base = OTHER; note = 2-Prime-O-Methyl modified nucleoside
  modified_base order(1^2,31^32): mod_base = OTHER; note = (1,3-dimethylimidazolidin-2-ylidene) Phosphoramidate linkage
  modified_base order(2..17,18..31): mod_base = OTHER; note = Phosphorothioate linkage
  modified_base 17^18: mod_base = OTHER; note = Methylphosphonate linkage
  misc_feature 1..32: note = RM109125

SEQ ID NO: 351 - DNA, 32 bp, synthetic construct; identical to SEQ ID NO: 190
  source 1..32: mol_type = other DNA
  misc_feature 13..14: note = DNA
  misc_feature order(1..12,15..32): note = RNA
  modified_base 12: mod_base = OTHER; note = 2-Prime-O-Methoxyethyl modified 5-methyl Cytidine
  modified_base 13: mod_base = OTHER; note = DNA nucleotide carrying a 6-amino-5-nitro-3-yl-2(1H)-pyridone nucleobase
  modified_base 14: mod_base = OTHER; note = DNA nucleotide carrying a hypoxanthine nucleobase
  modified_base order(10..11,16..18,20): mod_base = OTHER; note = 2-Prime-Fluoro modified nucleoside
  modified_base order(1..9,15,19,21..32): mod_base = OTHER; note = 2-Prime-O-Methyl modified nucleoside
  modified_base order(1^2,31^32): mod_base = OTHER; note = (1,3-dimethylimidazolidin-2-ylidene) Phosphoramidate linkage
  modified_base order(2..14,15..31): mod_base = OTHER; note = Phosphorothioate linkage
  modified_base 14^15: mod_base = OTHER; note = Methylphosphonate linkage
  misc_feature 1..32: note = RM109126

SEQ ID NO: 352 - DNA, 32 bp, synthetic construct; identical to SEQ ID NO: 191
  source 1..32: mol_type = other DNA
  misc_feature 10..11: note = DNA
  misc_feature order(1..9,12..32): note = RNA
  modified_base 9: mod_base = OTHER; note = 2-Prime-O-Methoxyethyl modified 5-methyl Cytidine
  modified_base 10: mod_base = OTHER; note = DNA nucleotide carrying a 6-amino-5-nitro-3-yl-2(1H)-pyridone nucleobase
  modified_base 11: mod_base = OTHER; note = DNA nucleotide carrying a hypoxanthine nucleobase
  modified_base order(7..8,13..15,17): mod_base = OTHER; note = 2-Prime-Fluoro modified nucleoside
  modified_base order(1..6,12,16,18..32): mod_base = OTHER; note = 2-Prime-O-Methyl modified nucleoside
  modified_base order(1^2,31^32): mod_base = OTHER; note = (1,3-dimethylimidazolidin-2-ylidene) Phosphoramidate linkage
  modified_base order(2..11,12..31): mod_base = OTHER; note = Phosphorothioate linkage
  modified_base 11^12: mod_base = OTHER; note = Methylphosphonate linkage
  misc_feature 1..32: note = RM109127

SEQ ID NO: 353 - DNA, 32 bp, synthetic construct; identical to SEQ ID NO: 192
  source 1..32: mol_type = other DNA
  misc_feature 7..8: note = DNA
  misc_feature order(1..6,9..32): note = RNA
  modified_base 6: mod_base = OTHER; note = 2-Prime-O-Methoxyethyl modified 5-methyl Cytidine
  modified_base 7: mod_base = OTHER; note = DNA nucleotide carrying a 6-amino-5-nitro-3-yl-2(1H)-pyridone nucleobase
  modified_base 8: mod_base = OTHER; note = DNA nucleotide carrying a hypoxanthine nucleobase
  modified_base order(4..5,10..12,14): mod_base = OTHER; note = 2-Prime-Fluoro modified nucleoside
  modified_base order(1..3,9,13,15..32): mod_base = OTHER; note = 2-Prime-O-Methyl modified nucleoside
  modified_base order(1^2,31^32): mod_base = OTHER; note = (1,3-dimethylimidazolidin-2-ylidene) Phosphoramidate linkage
  modified_base order(2..8,9..31): mod_base = OTHER; note = Phosphorothioate linkage
  modified_base 8^9: mod_base = OTHER; note = Methylphosphonate linkage
  misc_feature 1..32: note = RM109128

SEQ ID NO: 354 - DNA, 32 bp, synthetic construct; identical to SEQ ID NO: 185
  source 1..32: mol_type = other DNA
  misc_feature 28..29: note = DNA
  misc_feature order(1..27,30..32): note = RNA
  modified_base 27: mod_base = OTHER; note = 2-Prime-O-Methoxyethyl modified 5-methyl Cytidine
  modified_base 28: mod_base = OTHER; note = DNA nucleotide carrying a 6-amino-5-nitro-3-yl-2(1H)-pyridone nucleobase
  modified_base 29: mod_base = OTHER; note = DNA nucleotide carrying a hypoxanthine nucleobase
  modified_base order(25..26,31): mod_base = OTHER; note = 2-Prime-Fluoro modified nucleoside
  modified_base order(1..24,30,32): mod_base = OTHER; note = 2-Prime-O-Methyl modified nucleoside
  modified_base order(1^2,31^32): mod_base = OTHER; note = (1,3-dimethylimidazolidin-2-ylidene) Phosphoramidate linkage
  modified_base order(2..29,30^31): mod_base = OTHER; note = Phosphorothioate linkage
  modified_base 29^30: mod_base = OTHER; note = Methylphosphonate linkage
  misc_feature 1..32: note = RM109129

SEQ ID NO: 355 - DNA, 32 bp, synthetic construct; identical to SEQ ID NO: 186
  source 1..32: mol_type = other DNA
  misc_feature 25..26: note = DNA
  misc_feature order(1..24,27..32): note = RNA
  modified_base 24: mod_base = OTHER; note = 2-Prime-O-Methoxyethyl modified 5-methyl Cytidine
  modified_base 25: mod_base = OTHER; note = DNA nucleotide carrying a 6-amino-5-nitro-3-yl-2(1H)-pyridone nucleobase
  modified_base 26: mod_base = OTHER; note = DNA nucleotide carrying a hypoxanthine nucleobase
  modified_base order(22..23,28): mod_base = OTHER; note = 2-Prime-Fluoro modified nucleoside
  modified_base order(1..21,27,29..32): mod_base = OTHER; note = 2-Prime-O-Methyl modified nucleoside
  modified_base order(1^2,31^32): mod_base = OTHER; note = (1,3-dimethylimidazolidin-2-ylidene) Phosphoramidate linkage
  modified_base order(2..26,27..31): mod_base = OTHER; note = Phosphorothioate linkage
  modified_base 26^27: mod_base = OTHER; note = Methylphosphonate linkage
  misc_feature 1..32: note = RM109130

SEQ ID NO: 356 - DNA, 32 bp, synthetic construct; identical to SEQ ID NO: 187
  source 1..32: mol_type = other DNA
  misc_feature 22..23: note = DNA
  misc_feature order(1..21,24..32): note = RNA
  modified_base 21: mod_base = OTHER; note = 2-Prime-O-Methoxyethyl modified 5-methyl Cytidine
  modified_base 22: mod_base = OTHER; note = DNA nucleotide carrying a 6-amino-5-nitro-3-yl-2(1H)-pyridone nucleobase
  modified_base 23: mod_base = OTHER; note = DNA nucleotide carrying a hypoxanthine nucleobase
  modified_base order(19..20,25): mod_base = OTHER; note = 2-Prime-Fluoro modified nucleoside
  modified_base order(1..18,24,26..32): mod_base = OTHER; note = 2-Prime-O-Methyl modified nucleoside
  modified_base order(1^2,31^32): mod_base = OTHER; note = (1,3-dimethylimidazolidin-2-ylidene) Phosphoramidate linkage
  modified_base order(2..23,24..31): mod_base = OTHER; note = Phosphorothioate linkage
  modified_base 23^24: mod_base = OTHER; note = Methylphosphonate linkage
  misc_feature 1..32: note = RM109131

SEQ ID NO: 357 - DNA, 32 bp, synthetic construct; identical to SEQ ID NO: 5
  source 1..32: mol_type = other DNA
  misc_feature 19..20: note = DNA
  misc_feature order(1..18,21..32): note = RNA
  modified_base 18: mod_base = OTHER; note = 2-Prime-O-Methoxyethyl modified 5-methyl Cytidine
  modified_base 19: mod_base = OTHER; note = DNA nucleotide carrying a 6-amino-5-nitro-3-yl-2(1H)-pyridone nucleobase
  modified_base 20: mod_base = OTHER; note = DNA nucleotide carrying a hypoxanthine nucleobase
  modified_base order(16..17,22): mod_base = OTHER; note = 2-Prime-Fluoro modified nucleoside
  modified_base order(1..15,21,23..32): mod_base = OTHER; note = 2-Prime-O-Methyl modified nucleoside
  modified_base order(1^2,31^32): mod_base = OTHER; note = (1,3-dimethylimidazolidin-2-ylidene) Phosphoramidate linkage
  modified_base order(2..20,21..31): mod_base = OTHER; note = Phosphorothioate linkage
  modified_base 20^21: mod_base = OTHER; note = Methylphosphonate linkage
  misc_feature 1..32: note = RM109132

SEQ ID NO: 358 - DNA, 32 bp, synthetic construct; identical to SEQ ID NO: 189
  source 1..32: mol_type = other DNA
  misc_feature 16..17: note = DNA
  misc_feature order(1..15,18..32): note = RNA
  modified_base 15: mod_base = OTHER; note = 2-Prime-O-Methoxyethyl modified 5-methyl Cytidine
  modified_base 16: mod_base = OTHER; note = DNA nucleotide carrying a 6-amino-5-nitro-3-yl-2(1H)-pyridone nucleobase
  modified_base 17: mod_base = OTHER; note = DNA nucleotide carrying a hypoxanthine nucleobase
  modified_base order(13..14,19): mod_base = OTHER; note = 2-Prime-Fluoro modified nucleoside
  modified_base order(1..12,18,20..32): mod_base = OTHER; note = 2-Prime-O-Methyl modified nucleoside
  modified_base order(1^2,31^32): mod_base = OTHER; note = (1,3-dimethylimidazolidin-2-ylidene) Phosphoramidate linkage
  modified_base order(2..17,18..31): mod_base = OTHER; note = Phosphorothioate linkage
  modified_base 17^18: mod_base = OTHER; note = Methylphosphonate linkage
  misc_feature 1..32: note = RM109133

SEQ ID NO: 359 - DNA, 32 bp, synthetic construct; identical to SEQ ID NO: 190
  source 1..32: mol_type = other DNA
  misc_feature 13..14: note = DNA
  misc_feature order(1..12,15..32): note = RNA
  modified_base 12: mod_base = OTHER; note = 2-Prime-O-Methoxyethyl modified 5-methyl Cytidine
  modified_base 13: mod_base = OTHER; note = DNA nucleotide carrying a 6-amino-5-nitro-3-yl-2(1H)-pyridone nucleobase
  modified_base 14: mod_base = OTHER; note = DNA nucleotide carrying a hypoxanthine nucleobase
  modified_base order(10..11,16): mod_base = OTHER; note = 2-Prime-Fluoro modified nucleoside
  modified_base order(1..9,15,17..32): mod_base = OTHER; note = 2-Prime-O-Methyl modified nucleoside
  modified_base order(1^2,31^32): mod_base = OTHER; note = (1,3-dimethylimidazolidin-2-ylidene) Phosphoramidate linkage
  modified_base order(2..14,15..31): mod_base = OTHER; note = Phosphorothioate linkage
  modified_base 14^15: mod_base = OTHER; note = Methylphosphonate linkage
  misc_feature 1..32: note = RM109134

SEQ ID NO: 360 - DNA, 32 bp, synthetic construct; identical to SEQ ID NO: 191
  source 1..32: mol_type = other DNA
  misc_feature 10..11: note = DNA
  misc_feature order(1..9,12..32): note = RNA
  modified_base 9: mod_base = OTHER; note = 2-Prime-O-Methoxyethyl modified 5-methyl Cytidine
  modified_base 10: mod_base = OTHER; note = DNA nucleotide carrying a 6-amino-5-nitro-3-yl-2(1H)-pyridone nucleobase
  modified_base 11: mod_base = OTHER; note = DNA nucleotide carrying a hypoxanthine nucleobase
  modified_base order(7..8,13): mod_base = OTHER; note = 2-Prime-Fluoro modified nucleoside
  modified_base order(1..6,12,14..32): mod_base = OTHER; note = 2-Prime-O-Methyl modified nucleoside
  modified_base order(1^2,31^32): mod_base = OTHER; note = (1,3-dimethylimidazolidin-2-ylidene) Phosphoramidate linkage
  modified_base order(2..11,12..31): mod_base = OTHER; note = Phosphorothioate linkage
  modified_base 11^12: mod_base = OTHER; note = Methylphosphonate linkage
  misc_feature 1..32: note = RM109135

SEQ ID NO: 361 - DNA, 32 bp, synthetic construct; identical to SEQ ID NO: 192
  source 1..32: mol_type = other DNA
  misc_feature 7..8: note = DNA
  misc_feature order(1..6,9..32): note = RNA
  modified_base 6: mod_base = OTHER; note = 2-Prime-O-Methoxyethyl modified 5-methyl Cytidine
  modified_base 7: mod_base = OTHER; note = DNA nucleotide carrying a 6-amino-5-nitro-3-yl-2(1H)-pyridone nucleobase
  modified_base 8: mod_base = OTHER; note = DNA nucleotide carrying a hypoxanthine nucleobase
  modified_base order(4..5,10): mod_base = OTHER; note = 2-Prime-Fluoro modified nucleoside
  modified_base order(1..3,9,11..32): mod_base = OTHER; note = 2-Prime-O-Methyl modified nucleoside
  modified_base order(1^2,31^32): mod_base = OTHER; note = (1,3-dimethylimidazolidin-2-ylidene) Phosphoramidate linkage
  modified_base order(2..8,9..31): mod_base = OTHER; note = Phosphorothioate linkage
  modified_base 8^9: mod_base = OTHER; note = Methylphosphonate linkage
  misc_feature 1..32: note = RM109136

SEQ ID NO: 362 - DNA, 32 bp, synthetic construct; identical to SEQ ID NO: 190
  source 1..32: mol_type = other DNA
  misc_feature 13..14: note = DNA
  misc_feature order(1..12,15..32): note = RNA
  modified_base 12: mod_base = OTHER; note = 2-Prime-O-Methoxyethyl modified 5-methyl Cytidine
  modified_base 13: mod_base = OTHER; note = DNA nucleotide carrying a 6-amino-5-nitro-3-yl-2(1H)-pyridone nucleobase
  modified_base 14: mod_base = OTHER; note = DNA nucleotide carrying a hypoxanthine nucleobase
  modified_base order(7..9,16,29,32): mod_base = OTHER; note = 2-Prime-Fluoro modified nucleoside
  modified_base order(1..6,10..11,15,17..28,30..31): mod_base = OTHER; note = 2-Prime-O-Methyl modified nucleoside
  modified_base order(1^2,31^32): mod_base = OTHER; note = (1,3-dimethylimidazolidin-2-ylidene) Phosphoramidate linkage
  modified_base order(2..14,15..31): mod_base = OTHER; note = Phosphorothioate linkage
  modified_base 14^15: mod_base = OTHER; note = Methylphosphonate linkage
  misc_feature 1..32: note = RM109137

SEQ ID NO: 363 - DNA, 32 bp, synthetic construct; identical to SEQ ID NO: 191
  source 1..32: mol_type = other DNA
  misc_feature 10..11: note = DNA
  misc_feature order(1..9,12..32): note = RNA
  modified_base 9: mod_base = OTHER; note = 2-Prime-O-Methoxyethyl modified 5-methyl Cytidine
  modified_base 10: mod_base = OTHER; note = DNA nucleotide carrying a 6-amino-5-nitro-3-yl-2(1H)-pyridone nucleobase
  modified_base 11: mod_base = OTHER; note = DNA nucleotide carrying a hypoxanthine nucleobase
  modified_base order(4..6,13,26,29): mod_base = OTHER; note = 2-Prime-Fluoro modified nucleoside
  modified_base order(1..3,7..8,12,14..25,27..28,30..32): mod_base = OTHER; note = 2-Prime-O-Methyl modified nucleoside
  modified_base order(1^2,31^32): mod_base = OTHER; note = (1,3-dimethylimidazolidin-2-ylidene) Phosphoramidate linkage
  modified_base order(2..11,12..31): mod_base = OTHER; note = Phosphorothioate linkage
  modified_base 11^12: mod_base = OTHER; note = Methylphosphonate linkage
  misc_feature 1..32: note = RM109138

SEQ ID NO: 364 - DNA, 32 bp, synthetic construct; identical to SEQ ID NO: 192
  source 1..32: mol_type = other DNA
  misc_feature 7..8: note = DNA
  misc_feature order(1..6,9..32): note = RNA
  modified_base 6: mod_base = OTHER; note = 2-Prime-O-Methoxyethyl modified 5-methyl Cytidine
  modified_base 7: mod_base = OTHER; note = DNA nucleotide carrying a 6-amino-5-nitro-3-yl-2(1H)-pyridone nucleobase
  modified_base 8: mod_base = OTHER; note = DNA nucleotide carrying a hypoxanthine nucleobase
  modified_base order(1..3,10,23,26): mod_base = OTHER; note = 2-Prime-Fluoro modified nucleoside
  modified_base order(4..5,9,11..22,24..25,27..32): mod_base = OTHER; note = 2-Prime-O-Methyl modified nucleoside
  modified_base order(1^2,31^32): mod_base = OTHER; note = (1,3-dimethylimidazolidin-2-ylidene) Phosphoramidate linkage
  modified_base order(2..8,9..31): mod_base = OTHER; note = Phosphorothioate linkage
  modified_base 8^9: mod_base = OTHER; note = Methylphosphonate linkage
  misc_feature 1..32: note = RM109139

SEQ ID NO: 365 - DNA, 32 bp, synthetic construct; identical to SEQ ID NO: 187
  source 1..32: mol_type = other DNA
  misc_feature 22..23: note = DNA
  misc_feature order(1..21,24..32): note = RNA
  modified_base 21: mod_base = OTHER; note = 2-Prime-O-Methoxyethyl modified 5-methyl Cytidine
  modified_base 22: mod_base = OTHER; note = DNA nucleotide carrying a 6-amino-5-nitro-3-yl-2(1H)-pyridone nucleobase
  modified_base 23: mod_base = OTHER; note = DNA nucleotide carrying a hypoxanthine nucleobase
  modified_base order(5,8,25,28..30): mod_base = OTHER; note = 2-Prime-Fluoro modified nucleoside
  modified_base order(1..4,6..7,9..20,24,26..27,31..32): mod_base = OTHER; note = 2-Prime-O-Methyl modified nucleoside
  modified_base order(1^2,31^32): mod_base = OTHER; note = (1,3-dimethylimidazolidin-2-ylidene) Phosphoramidate linkage
  modified_base order(2..23,24..31): mod_base = OTHER; note = Phosphorothioate linkage
  modified_base 23^24: mod_base = OTHER; note = Methylphosphonate linkage
  misc_feature 1..32: note = RM109140

SEQ ID NO: 366 - DNA, 32 bp, synthetic construct; identical to SEQ ID NO: 5
  source 1..32: mol_type = other DNA
  misc_feature 19..20: note = DNA
  misc_feature order(1..18,21..32): note = RNA
  modified_base 18: mod_base = OTHER; note = 2-Prime-O-Methoxyethyl modified 5-methyl Cytidine
  modified_base 19: mod_base = OTHER; note = DNA nucleotide carrying a 6-amino-5-nitro-3-yl-2(1H)-pyridone nucleobase
  modified_base 20: mod_base = OTHER; note = DNA nucleotide carrying a hypoxanthine nucleobase
  modified_base order(2,5,22,25..27): mod_base = OTHER; note = 2-Prime-Fluoro modified nucleoside
  modified_base order(1,3..4,6..17,21,23..24,28..32): mod_base = OTHER; note = 2-Prime-O-Methyl modified nucleoside
  modified_base order(1^2,31^32): mod_base = OTHER; note = (1,3-dimethylimidazolidin-2-ylidene) Phosphoramidate linkage
  modified_base order(2..20,21..31): mod_base = OTHER; note = Phosphorothioate linkage
  modified_base 20^21: mod_base = OTHER; note = Methylphosphonate linkage
  misc_feature 1..32: note = RM109141

SEQ ID NO: 367 - DNA, 23 bp, synthetic construct
  source 1..23: mol_type = other DNA
  misc_feature 18..19: note = DNA
  misc_feature order(1..17,20..23): note = RNA
  modified_base 17: mod_base = OTHER; note = 2-Prime-O-Methoxyethyl modified 5-methyl Cytidine
  modified_base 18: mod_base = OTHER; note = DNA nucleotide carrying a 6-amino-5-nitro-3-yl-2(1H)-pyridone nucleobase
  modified_base 19: mod_base = OTHER; note = DNA nucleotide carrying a hypoxanthine nucleobase
  modified_base order(12..14,21): mod_base = OTHER; note = 2-Prime-Fluoro modified nucleoside
  modified_base order(1..11,15..16,20,22..23): mod_base = OTHER; note = 2-Prime-O-Methyl modified nucleoside
  modified_base order(1^2,22^23): mod_base = OTHER; note = (1,3-dimethylimidazolidin-2-ylidene) Phosphoramidate linkage
  modified_base order(2..19,20..22): mod_base = OTHER; note = Phosphorothioate linkage
  modified_base 19^20: mod_base = OTHER; note = Methylphosphonate linkage
  misc_feature 1..23: note = RM109142
ggggcatgatgccatacnntgcc

SEQ ID NO: 368 - DNA, 23 bp, synthetic construct
  source 1..23: mol_type = other DNA
  misc_feature 15..16: note = DNA
  misc_feature order(1..14,17..23): note = RNA
  modified_base 14: mod_base = OTHER; note = 2-Prime-O-Methoxyethyl modified 5-methyl Cytidine
  modified_base 15: mod_base = OTHER; note = DNA nucleotide carrying a 6-amino-5-nitro-3-yl-2(1H)-pyridone nucleobase
  modified_base 16: mod_base = OTHER; note = DNA nucleotide carrying a hypoxanthine nucleobase
  modified_base order(9..11,18): mod_base = OTHER; note = 2-Prime-Fluoro modified nucleoside
  modified_base order(1..8,12..13,17,19..23): mod_base = OTHER; note = 2-Prime-O-Methyl modified nucleoside
  modified_base order(1^2,22^23): mod_base = OTHER; note = (1,3-dimethylimidazolidin-2-ylidene) Phosphoramidate linkage
  modified_base order(2..16,17..22): mod_base = OTHER; note = Phosphorothioate linkage
  modified_base 16^17: mod_base = OTHER; note = Methylphosphonate linkage
  misc_feature 1..23: note = RM109143
gcatgatgccatacnntgccacc

SEQ ID NO: 369 - DNA, 23 bp, synthetic construct
  source 1..23: mol_type = other DNA
  misc_feature 12..13: note = DNA
  misc_feature order(1..11,14..23): note = RNA
  modified_base 11: mod_base = OTHER; note = 2-Prime-O-Methoxyethyl modified 5-methyl Cytidine
  modified_base 12: mod_base = OTHER; note = DNA nucleotide carrying a 6-amino-5-nitro-3-yl-2(1H)-pyridone nucleobase
  modified_base 13: mod_base = OTHER; note = DNA nucleotide carrying a hypoxanthine nucleobase
  modified_base order(6..8,15): mod_base = OTHER; note = 2-Prime-Fluoro modified nucleoside
  modified_base order(1..5,9..10,14,16..23): mod_base = OTHER; note = 2-Prime-O-Methyl modified nucleoside
  modified_base order(1^2,22^23): mod_base = OTHER; note = (1,3-dimethylimidazolidin-2-ylidene) Phosphoramidate linkage
  modified_base order(2..13,14..22): mod_base = OTHER; note = Phosphorothioate linkage
  modified_base 13^14: mod_base = OTHER; note = Methylphosphonate linkage
  misc_feature 1..23: note = RM109144
tgatgccatacnntgccaccagg

SEQ ID NO: 370 - DNA, 23 bp, synthetic construct
  source 1..23: mol_type = other DNA
  misc_feature 9..10: note = DNA
  misc_feature order(1..8,11..23): note = RNA
  modified_base 8: mod_base = OTHER; note = 2-Prime-O-Methoxyethyl modified 5-methyl Cytidine
  modified_base 9: mod_base = OTHER; note = DNA nucleotide carrying a 6-amino-5-nitro-3-yl-2(1H)-pyridone nucleobase
  modified_base 10: mod_base = OTHER; note = DNA nucleotide carrying a hypoxanthine nucleobase
  modified_base order(3..5,12): mod_base = OTHER; note = 2-Prime-Fluoro modified nucleoside
  modified_base order(1..2,6..7,11,13..23): mod_base = OTHER; note = 2-Prime-O-Methyl modified nucleoside
  modified_base order(1^2,22^23): mod_base = OTHER; note = (1,3-dimethylimidazolidin-2-ylidene) Phosphoramidate linkage
  modified_base order(2..10,11..22): mod_base = OTHER; note = Phosphorothioate linkage
  modified_base 10^11: mod_base = OTHER; note = Methylphosphonate linkage
  misc_feature 1..23: note = RM109145
tgccatacnntgccaccagggcg

SEQ ID NO: 371 - DNA, 23 bp, synthetic construct
  source 1..23: mol_type = other DNA
  misc_feature 18..19: note = DNA
  misc_feature order(1..17,20..23): note = RNA
  modified_base 17: mod_base = OTHER; note = 2-Prime-O-Methoxyethyl modified 5-methyl Cytidine
  modified_base 18: mod_base = OTHER; note = DNA nucleotide carrying a 6-amino-5-nitro-3-yl-2(1H)-pyridone nucleobase
  modified_base 19: mod_base = OTHER; note = DNA nucleotide carrying a hypoxanthine nucleobase
  modified_base order(14,21): mod_base = OTHER; note = 2-Prime-Fluoro modified nucleoside
  modified_base order(1..13,15..16,20,22..23): mod_base = OTHER; note = 2-Prime-O-Methyl modified nucleoside
  modified_base order(1^2,22^23): mod_base = OTHER; note = (1,3-dimethylimidazolidin-2-ylidene) Phosphoramidate linkage
  modified_base order(2..19,20..22): mod_base = OTHER; note = Phosphorothioate linkage
  modified_base 19^20: mod_base = OTHER; note = Methylphosphonate linkage
  misc_feature 1..23: note = RM109146
ggggcatgatgccatacnntgcc

SEQ ID NO: 372 - DNA, 23 bp, synthetic construct
  source 1..23: mol_type = other DNA
  misc_feature 15..16: note = DNA
  misc_feature order(1..14,17..23): note = RNA
  modified_base 14: mod_base = OTHER; note = 2-Prime-O-Methoxyethyl modified 5-methyl Cytidine
  modified_base 15: mod_base = OTHER; note = DNA nucleotide carrying a 6-amino-5-nitro-3-yl-2(1H)-pyridone nucleobase
  modified_base 16: mod_base = OTHER; note = DNA nucleotide carrying a hypoxanthine nucleobase
  modified_base order(11,18): mod_base = OTHER; note = 2-Prime-Fluoro modified nucleoside
  modified_base order(1..10,12..13,17,19..23): mod_base = OTHER; note = 2-Prime-O-Methyl modified nucleoside
  modified_base order(1^2,22^23): mod_base = OTHER; note = (1,3-dimethylimidazolidin-2-ylidene) Phosphoramidate linkage
  modified_base order(2..16,17..22): mod_base = OTHER; note = Phosphorothioate linkage
  modified_base 16^17: mod_base = OTHER; note = Methylphosphonate linkage
  misc_feature 1..23: note = RM109147
gcatgatgccatacnntgccacc

SEQ ID NO: 373 - DNA, 23 bp, synthetic construct
  source 1..23: mol_type = other DNA
  misc_feature 12..13: note = DNA
  misc_feature order(1..11,14..23): note = RNA
  modified_base 11: mod_base = OTHER; note = 2-Prime-O-Methoxyethyl modified 5-methyl Cytidine
  modified_base 12: mod_base = OTHER; note = DNA nucleotide carrying a 6-amino-5-nitro-3-yl-2(1H)-pyridone nucleobase
  modified_base 13: mod_base = OTHER; note = DNA nucleotide carrying a hypoxanthine nucleobase
  modified_base order(8,15): mod_base = OTHER; note = 2-Prime-Fluoro modified nucleoside
  modified_base order(1..7,9..10,14,16..23): mod_base = OTHER; note = 2-Prime-O-Methyl modified nucleoside
  modified_base order(1^2,22^23): mod_base = OTHER; note = (1,3-dimethylimidazolidin-2-ylidene) Phosphoramidate linkage
  modified_base order(2..13,14..22): mod_base = OTHER; note = Phosphorothioate linkage
  modified_base 13^14: mod_base = OTHER; note = Methylphosphonate linkage
  misc_feature 1..23: note = RM109148
tgatgccatacnntgccaccagg

SEQ ID NO: 374 - DNA, 23 bp, synthetic construct
  source 1..23: mol_type = other DNA
  misc_feature 9..10: note = DNA
  misc_feature order(1..8,11..23): note = RNA
  modified_base 8: mod_base = OTHER; note = 2-Prime-O-Methoxyethyl modified 5-methyl Cytidine
  modified_base 9: mod_base = OTHER; note = DNA nucleotide carrying a 6-amino-5-nitro-3-yl-2(1H)-pyridone nucleobase
  modified_base 10: mod_base = OTHER; note = DNA nucleotide carrying a hypoxanthine nucleobase
  modified_base order(5,12): mod_base = OTHER; note = 2-Prime-Fluoro modified nucleoside
  modified_base order(1..4,6..7,11,13..23): mod_base = OTHER; note = 2-Prime-O-Methyl modified nucleoside
  modified_base order(1^2,22^23): mod_base = OTHER; note = (1,3-dimethylimidazolidin-2-ylidene) Phosphoramidate linkage
  modified_base order(2..10,11..22): mod_base = OTHER; note = Phosphorothioate linkage
  modified_base 10^11: mod_base = OTHER; note = Methylphosphonate linkage
  misc_feature 1..23: note = RM109149
tgccatacnntgccaccagggcg

SEQ ID NO: 375 - DNA, 23 bp, synthetic construct
  source 1..23: mol_type = other DNA
  misc_feature 6..7: note = DNA
  misc_feature order(1..5,8..23): note = RNA
  modified_base 5: mod_base = OTHER; note = 2-Prime-O-Methoxyethyl modified 5-methyl Cytidine
  modified_base 6: mod_base = OTHER; note = DNA nucleotide carrying a 6-amino-5-nitro-3-yl-2(1H)-pyridone nucleobase
  modified_base 7: mod_base = OTHER; note = DNA nucleotide carrying a hypoxanthine nucleobase
  modified_base order(2,9): mod_base = OTHER; note = 2-Prime-Fluoro modified nucleoside
  modified_base order(1,3..4,8,10..23): mod_base = OTHER; note = 2-Prime-O-Methyl modified nucleoside
  modified_base order(1^2,22^23): mod_base = OTHER; note = (1,3-dimethylimidazolidin-2-ylidene) Phosphoramidate linkage
  modified_base order(2..7,8..22): mod_base = OTHER; note = Phosphorothioate linkage
  modified_base 7^8: mod_base = OTHER; note = Methylphosphonate linkage
  misc_feature 1..23: note = RM109150
catacnntgccaccagggcgatg

SEQ ID NO: 376 - DNA, 26 bp, synthetic construct
  source 1..26: mol_type = other DNA
  misc_feature 22..23: note = DNA
  misc_feature order(1..21,24..26): note = RNA
  modified_base 21: mod_base = OTHER; note = 2-Prime-O-Methoxyethyl modified 5-methyl Cytidine
  modified_base 22: mod_base = OTHER; note = DNA nucleotide carrying a 6-amino-5-nitro-3-yl-2(1H)-pyridone nucleobase
  modified_base 23: mod_base = OTHER; note = DNA nucleotide carrying a hypoxanthine nucleobase
  modified_base order(18,25): mod_base = OTHER; note = 2-Prime-Fluoro modified nucleoside
  modified_base order(1..17,19..20,24,26): mod_base = OTHER; note = 2-Prime-O-Methyl modified nucleoside
  modified_base order(1^2,25^26): mod_base = OTHER; note = (1,3-dimethylimidazolidin-2-ylidene) Phosphoramidate linkage
  modified_base order(2..23,24^25): mod_base = OTHER; note = Phosphorothioate linkage
  modified_base 23^24: mod_base = OTHER; note = Methylphosphonate linkage
  misc_feature 1..26: note = RM109151
gtgaggggcatgatgccatacnntgc

SEQ ID NO: 377 - DNA, 26 bp, synthetic construct
  source 1..26: mol_type = other DNA
  misc_feature 19..20: note = DNA
  misc_feature order(1..18,21..26): note = RNA
  modified_base 18: mod_base = OTHER; note = 2-Prime-O-Methoxyethyl modified 5-methyl Cytidine
  modified_base 19: mod_base = OTHER; note = DNA nucleotide carrying a 6-amino-5-nitro-3-yl-2(1H)-pyridone nucleobase
  modified_base 20: mod_base = OTHER; note = DNA nucleotide carrying a hypoxanthine nucleobase
  modified_base order(15,22): mod_base = OTHER; note = 2-Prime-Fluoro modified nucleoside
  modified_base order(1..14,16..17,21,23..26): mod_base = OTHER; note = 2-Prime-O-Methyl modified nucleoside
  modified_base order(1^2,25^26): mod_base = OTHER; note = (1,3-dimethylimidazolidin-2-ylidene) Phosphoramidate linkage
  modified_base order(2..20,21..25): mod_base = OTHER; note = Phosphorothioate linkage
  modified_base 20^21: mod_base = OTHER; note = Methylphosphonate linkage
  misc_feature 1..26: note = RM109152
aggggcatgatgccatacnntgccac

SEQ ID NO: 378 - DNA, 26 bp, synthetic construct
  source 1..26: mol_type = other DNA
  misc_feature 16..17: note = DNA
  misc_feature order(1..15,18..26): note = RNA
  modified_base 15: mod_base = OTHER; note = 2-Prime-O-Methoxyethyl modified 5-methyl Cytidine
  modified_base 16: mod_base = OTHER; note = DNA nucleotide carrying a 6-amino-5-nitro-3-yl-2(1H)-pyridone nucleobase
  modified_base 17: mod_base = OTHER; note = DNA nucleotide carrying a hypoxanthine nucleobase
  modified_base order(12,19): mod_base = OTHER; note = 2-Prime-Fluoro modified nucleoside
  modified_base order(1..11,13..14,18,20..26): mod_base = OTHER; note = 2-Prime-O-Methyl modified nucleoside
  modified_base order(1^2,25^26): mod_base = OTHER; note = (1,3-dimethylimidazolidin-2-ylidene) Phosphoramidate linkage
  modified_base order(2..17,18..25): mod_base = OTHER; note = Phosphorothioate linkage
  modified_base 17^18: mod_base = OTHER; note = Methylphosphonate linkage
  misc_feature 1..26: note = RM109153
ggcatgatgccatacnntgccaccag

SEQ ID NO: 379 - DNA, 26 bp, synthetic construct
  source 1..26: mol_type = other DNA
  misc_feature 13..14: note = DNA
  misc_feature order(1..12,15..26): note = RNA
  modified_base 12: mod_base = OTHER; note = 2-Prime-O-Methoxyethyl modified 5-methyl Cytidine
  modified_base 13: mod_base = OTHER; note = DNA nucleotide carrying a 6-amino-5-nitro-3-yl-2(1H)-pyridone nucleobase
  modified_base 14: mod_base = OTHER; note = DNA nucleotide carrying a hypoxanthine nucleobase
  modified_base order(9,16): mod_base = OTHER; note = 2-Prime-Fluoro modified nucleoside
  modified_base order(1..8,10..11,15,17..26): mod_base = OTHER; note = 2-Prime-O-Methyl modified nucleoside
  modified_base order(1^2,25^26): mod_base = OTHER; note = (1,3-dimethylimidazolidin-2-ylidene) Phosphoramidate linkage
  modified_base order(2..14,15..25): mod_base = OTHER; note = Phosphorothioate linkage
  modified_base 14^15: mod_base = OTHER; note = Methylphosphonate linkage
  misc_feature 1..26: note = RM109154
atgatgccatacnntgccaccagggc

SEQ ID NO: 380 - DNA, 26 bp, synthetic construct
  source 1..26: mol_type = other DNA
  misc_feature 10..11: note = DNA
  misc_feature order(1..9,12..26): note = RNA
  modified_base 9: mod_base = OTHER; note = 2-Prime-O-Methoxyethyl modified 5-methyl Cytidine
  modified_base 10: mod_base = OTHER; note = DNA nucleotide carrying a 6-amino-5-nitro-3-yl-2(1H)-pyridone nucleobase
  modified_base 11: mod_base = OTHER; note = DNA nucleotide carrying a hypoxanthine nucleobase
  modified_base order(6,13): mod_base = OTHER; note = 2-Prime-Fluoro modified nucleoside
  modified_base order(1..5,7..8,12,14..26): mod_base = OTHER; note = 2-Prime-O-Methyl modified nucleoside
  modified_base order(1^2,25^26): mod_base = OTHER; note = (1,3-dimethylimidazolidin-2-ylidene) Phosphoramidate linkage
  modified_base order(2..11,12..25): mod_base = OTHER; note = Phosphorothioate linkage
  modified_base 11^12: mod_base = OTHER; note = Methylphosphonate linkage
  misc_feature 1..26: note = RM109155
atgccatacnntgccaccagggcgat

SEQ ID NO: 381 - DNA, 26 bp, synthetic construct
  source 1..26: mol_type = other DNA
  misc_feature 7..8: note = DNA
  misc_feature order(1..6,9..26): note = RNA
  modified_base 6: mod_base = OTHER; note = 2-Prime-O-Methoxyethyl modified 5-methyl Cytidine
  modified_base 7: mod_base = OTHER; note = DNA nucleotide carrying a 6-amino-5-nitro-3-yl-2(1H)-pyridone nucleobase
  modified_base 8: mod_base = OTHER; note = DNA nucleotide carrying a hypoxanthine nucleobase
  modified_base order(3,10): mod_base = OTHER; note = 2-Prime-Fluoro modified nucleoside
  modified_base order(1..2,4..5,9,11..26): mod_base = OTHER; note = 2-Prime-O-Methyl modified nucleoside
  modified_base order(1^2,25^26): mod_base = OTHER; note = (1,3-dimethylimidazolidin-2-ylidene) Phosphoramidate linkage
  modified_base order(2..8,9..25): mod_base = OTHER; note = Phosphorothioate linkage
  modified_base 8^9: mod_base = OTHER; note = Methylphosphonate linkage
  misc_feature 1..26: note = RM109156
ccatacnntgccaccagggcgatggc

SEQ ID NO: 382 - DNA, 29 bp, synthetic construct
  source 1..29: mol_type = other DNA
  misc_feature 24..25: note = DNA
  misc_feature order(1..23,26..29): note = RNA
  modified_base 23: mod_base = OTHER; note = 2-Prime-O-Methoxyethyl modified 5-methyl Cytidine
  modified_base 24: mod_base = OTHER; note = DNA nucleotide carrying a 6-amino-5-nitro-3-yl-2(1H)-pyridone nucleobase
  modified_base 25: mod_base = OTHER; note = DNA nucleotide carrying a hypoxanthine nucleobase
  modified_base order(20,27): mod_base = OTHER; note = 2-Prime-Fluoro modified nucleoside
  modified_base order(1..19,21..22,26,28..29): mod_base = OTHER; note = 2-Prime-O-Methyl modified nucleoside
  modified_base order(1^2,28^29): mod_base = OTHER; note = (1,3-dimethylimidazolidin-2-ylidene) Phosphoramidate linkage
  modified_base order(2..25,26..28): mod_base = OTHER; note = Phosphorothioate linkage
  modified_base 25^26: mod_base = OTHER; note = Methylphosphonate linkage
  misc_feature 1..29: note = RM109157
ccgtgaggggcatgatgccatacnntgcc

SEQ ID NO: 383 - DNA, 29 bp, synthetic construct
  source 1..29: mol_type = other DNA
  misc_feature 21..22: note = DNA
  misc_feature order(1..20,23..29): note = RNA
  modified_base 20: mod_base = OTHER; note = 2-Prime-O-Methoxyethyl modified 5-methyl Cytidine
  modified_base 21: mod_base = OTHER; note = DNA nucleotide carrying a 6-amino-5-nitro-3-yl-2(1H)-pyridone nucleobase
  modified_base 22: mod_base = OTHER; note = DNA nucleotide carrying a hypoxanthine nucleobase
  modified_base order(17,24): mod_base = OTHER; note = 2-Prime-Fluoro modified nucleoside
  modified_base order(1..16,18..19,23,25..29): mod_base = OTHER; note = 2-Prime-O-Methyl modified nucleoside
  modified_base order(1^2,28^29): mod_base = OTHER; note = (1,3-dimethylimidazolidin-2-ylidene) Phosphoramidate linkage
  modified_base order(2..22,23..28): mod_base = OTHER; note = Phosphorothioate linkage
  modified_base 22^23: mod_base = OTHER; note = Methylphosphonate linkage
  misc_feature 1..29: note = RM109158
tgaggggcatgatgccatacnntgccacc

SEQ ID NO: 384 - DNA, 29 bp, synthetic construct
  source 1..29: mol_type = other DNA
  misc_feature 18..19: note = DNA
  misc_feature order(1..17,20..29): note = RNA
  modified_base 17: mod_base = OTHER; note = 2-Prime-O-Methoxyethyl modified 5-methyl Cytidine
  modified_base 18: mod_base = OTHER; note = DNA nucleotide carrying a 6-amino-5-nitro-3-yl-2(1H)-pyridone nucleobase
  modified_base 19: mod_base = OTHER; note = DNA nucleotide carrying a hypoxanthine nucleobase
  modified_base order(14,21): mod_base = OTHER; note = 2-Prime-Fluoro modified nucleoside
  modified_base order(1..13,15..16,20,22..29): mod_base = OTHER; note = 2-Prime-O-Methyl modified nucleoside
  modified_base order(1^2,28^29): mod_base = OTHER; note = (1,3-dimethylimidazolidin-2-ylidene) Phosphoramidate linkage
  modified_base order(2..19,20..28): mod_base = OTHER; note = Phosphorothioate linkage
  modified_base 19^20: mod_base = OTHER; note = Methylphosphonate linkage
  misc_feature 1..29: note = RM109159
ggggcatgatgccatacnntgccaccagg

SEQ ID NO: 385 - DNA, 29 bp, synthetic construct
  source 1..29: mol_type = other DNA
  misc_feature 15..16: note = DNA
  misc_feature order(1..14,17..29): note = RNA
  modified_base 14: mod_base = OTHER; note = 2-Prime-O-Methoxyethyl modified 5-methyl Cytidine
  modified_base 15: mod_base = OTHER; note = DNA nucleotide carrying a 6-amino-5-nitro-3-yl-2(1H)-pyridone nucleobase
  modified_base 16: mod_base = OTHER; note = DNA nucleotide carrying a hypoxanthine nucleobase
  modified_base order(11,18): mod_base = OTHER; note = 2-Prime-Fluoro modified nucleoside
  modified_base order(1..10,12..13,17,19..29): mod_base = OTHER; note = 2-Prime-O-Methyl modified nucleoside
  modified_base order(1^2,28^29): mod_base = OTHER; note = (1,3-dimethylimidazolidin-2-ylidene) Phosphoramidate linkage
  modified_base order(2..16,17..28): mod_base = OTHER; note = Phosphorothioate linkage
  modified_base 16^17: mod_base = OTHER; note = Methylphosphonate linkage
  misc_feature 1..29: note = RM109160
gcatgatgccatacnntgccaccagggcg

SEQ ID NO: 386 - DNA, 29 bp, synthetic construct
  source 1..29: mol_type = other DNA
  misc_feature 12..13: note = DNA
  misc_feature order(1..11,14..29): note = RNA
  modified_base 11: mod_base = OTHER; note = 2-Prime-O-Methoxyethyl modified 5-methyl Cytidine
  modified_base 12: mod_base = OTHER; note = DNA nucleotide carrying a 6-amino-5-nitro-3-yl-2(1H)-pyridone nucleobase
  modified_base 13: mod_base = OTHER; note = DNA nucleotide carrying a hypoxanthine nucleobase
  modified_base order(8,15): mod_base = OTHER; note = 2-Prime-Fluoro modified nucleoside
  modified_base order(1..7,9..10,14,16..29): mod_base = OTHER; note = 2-Prime-O-Methyl modified nucleoside
  modified_base order(1^2,28^29): mod_base = OTHER; note = (1,3-dimethylimidazolidin-2-ylidene) Phosphoramidate linkage
  modified_base order(2..13,14..28): mod_base = OTHER; note = Phosphorothioate linkage
  modified_base 13^14: mod_base = OTHER; note = Methylphosphonate linkage
  misc_feature 1..29: note = RM109161
tgatgccatacnntgccaccagggcgatg

SEQ ID NO: 387 - DNA, 29 bp, synthetic construct
  source 1..29: mol_type = other DNA
  misc_feature 9..10: note = DNA
  misc_feature order(1..8,11..29): note = RNA
  modified_base 8: mod_base = OTHER; note = 2-Prime-O-Methoxyethyl modified 5-methyl Cytidine
  modified_base 9: mod_base = OTHER; note = DNA nucleotide carrying a 6-amino-5-nitro-3-yl-2(1H)-pyridone nucleobase
  modified_base 10: mod_base = OTHER; note = DNA nucleotide carrying a hypoxanthine nucleobase
  modified_base order(5,12): mod_base = OTHER; note = 2-Prime-Fluoro modified nucleoside
  modified_base order(1..4,6..7,11,13..29): mod_base = OTHER; note = 2-Prime-O-Methyl modified nucleoside
  modified_base order(1^2,28^29): mod_base = OTHER; note = (1,3-dimethylimidazolidin-2-ylidene) Phosphoramidate linkage
  modified_base order(2..10,11..28): mod_base = OTHER; note = Phosphorothioate linkage
  modified_base 10^11: mod_base = OTHER; note = Methylphosphonate linkage
  misc_feature 1..29: note = RM109162
tgccatacnntgccaccagggcgatggcc

SEQ ID NO: 388 - DNA, 29 bp, synthetic construct
  source 1..29: mol_type = other DNA
  misc_feature 6..7: note = DNA
  misc_feature order(1..5,8..29): note = RNA
  modified_base 5: mod_base = OTHER; note = 2-Prime-O-Methoxyethyl modified 5-methyl Cytidine
  modified_base 6: mod_base = OTHER; note = DNA nucleotide carrying a 6-amino-5-nitro-3-yl-2(1H)-pyridone nucleobase
  modified_base 7: mod_base = OTHER; note = DNA nucleotide carrying a hypoxanthine nucleobase
  modified_base order(2,9): mod_base = OTHER; note = 2-Prime-Fluoro modified nucleoside
  modified_base order(1,3..4,8,10..29): mod_base = OTHER; note = 2-Prime-O-Methyl modified nucleoside
  modified_base order(1^2,28^29): mod_base = OTHER; note = (1,3-dimethylimidazolidin-2-ylidene) Phosphoramidate linkage
  modified_base order(2..7,8..28): mod_base = OTHER; note = Phosphorothioate linkage
  modified_base 7^8: mod_base = OTHER; note = Methylphosphonate linkage
  misc_feature 1..29: note = RM109163
catacnntgccaccagggcgatggccagc

SEQ ID NO: 389 - DNA, 29 bp, synthetic construct
  source 1..29: mol_type = other DNA
  misc_feature 24..25: note = DNA
  misc_feature order(1..23,26..29): note = RNA
  modified_base 23: mod_base = OTHER; note = 2-Prime-O-Methoxyethyl modified 5-methyl Cytidine
  modified_base 24: mod_base = OTHER; note = DNA nucleotide carrying a 6-amino-5-nitro-3-yl-2(1H)-pyridone nucleobase
  modified_base 25: mod_base = OTHER; note = DNA nucleotide carrying a hypoxanthine nucleobase
  modified_base order(1..4,15,17,21,27): mod_base = OTHER; note = 2-Prime-Fluoro modified nucleoside
  modified_base order(5..14,16,18..20,22,26,28..29): mod_base = OTHER; note = 2-Prime-O-Methyl modified nucleoside
  modified_base order(1^2,28^29): mod_base = OTHER; note = (1,3-dimethylimidazolidin-2-ylidene) Phosphoramidate linkage
  modified_base order(2..25,26..28): mod_base = OTHER; note = Phosphorothioate linkage
  modified_base 25^26: mod_base = OTHER; note = Methylphosphonate linkage
  misc_feature 1..29: note = RM109164
ccgtgaggggcatgatgccatacnntgcc

SEQ ID NO: 390 - DNA, 26 bp, synthetic construct
  source 1..26: mol_type = other DNA
  misc_feature 22..23: note = DNA
  misc_feature order(1..21,24..26): note = RNA
  modified_base 21: mod_base = OTHER; note = 2-Prime-O-Methoxyethyl modified 5-methyl Cytidine
  modified_base 22: mod_base = OTHER; note = DNA nucleotide carrying a 6-amino-5-nitro-3-yl-2(1H)-pyridone nucleobase
  modified_base 23: mod_base = OTHER; note = DNA nucleotide carrying a hypoxanthine nucleobase
  modified_base order(2,13,15,19,25): mod_base = OTHER; note = 2-Prime-Fluoro modified nucleoside
  modified_base order(1,3..12,14,16..18,20,24,26): mod_base = OTHER; note = 2-Prime-O-Methyl modified nucleoside
  modified_base order(1^2,25^26): mod_base = OTHER; note = (1,3-dimethylimidazolidin-2-ylidene) Phosphoramidate linkage
  modified_base order(2..23,24^25): mod_base = OTHER; note = Phosphorothioate linkage
  modified_base 23^24: mod_base = OTHER; note = Methylphosphonate linkage
  misc_feature 1..26: note = RM109165
gtgaggggcatgatgccatacnntgc

SEQ ID NO: 391 - DNA, 29 bp, synthetic construct
  source 1..29: mol_type = other DNA
  misc_feature 24..25: note = DNA
  misc_feature order(1..23,26..29): note = RNA
  modified_base 23: mod_base = OTHER; note = 2-Prime-O-Methoxyethyl modified 5-methyl Cytidine
  modified_base 24: mod_base = OTHER; note = DNA nucleotide carrying a 6-amino-5-nitro-3-yl-2(1H)-pyridone nucleobase
  modified_base 25: mod_base = OTHER; note = DNA nucleotide carrying a hypoxanthine nucleobase
  modified_base order(4,15,17,21,27): mod_base = OTHER; note = 2-Prime-Fluoro modified nucleoside
  modified_base order(1..3,5..14,16,18..20,22,26,28..29): mod_base = OTHER; note = 2-Prime-O-Methyl modified nucleoside
  modified_base order(1^2,28^29): mod_base = OTHER; note = (1,3-dimethylimidazolidin-2-ylidene) Phosphoramidate linkage
  modified_base order(2..25,26..28): mod_base = OTHER; note = Phosphorothioate linkage
  modified_base 25^26: mod_base = OTHER; note = Methylphosphonate linkage
  misc_feature 1..29: note = RM109166
ccgtgaggggcatgatgccatacnntgcc

SEQ ID NO: 392 - DNA, 29 bp, synthetic construct
  source 1..29: mol_type = other DNA
  misc_feature 21..22: note = DNA
  misc_feature order(1..20,23..29): note = RNA
  modified_base 20: mod_base = OTHER; note = 2-Prime-O-Methoxyethyl modified 5-methyl Cytidine
  modified_base 21: mod_base = OTHER; note = DNA nucleotide carrying a 6-amino-5-nitro-3-yl-2(1H)-pyridone nucleobase
  modified_base 22: mod_base = OTHER; note = DNA nucleotide carrying a hypoxanthine nucleobase
  modified_base order(1,12,14,18,24): mod_base = OTHER; note = 2-Prime-Fluoro modified nucleoside
  modified_base order(2..11,13,15..17,19,23,25..29): mod_base = OTHER; note = 2-Prime-O-Methyl modified nucleoside
  modified_base order(1^2,28^29): mod_base = OTHER; note = (1,3-dimethylimidazolidin-2-ylidene) Phosphoramidate linkage
  modified_base order(2..22,23..28): mod_base = OTHER; note = Phosphorothioate linkage
  modified_base 22^23: mod_base = OTHER; note = Methylphosphonate linkage
  misc_feature 1..29: note = RM109167
tgaggggcatgatgccatacnntgccacc

SEQ ID NO: 393 - DNA, 32 bp, synthetic construct; identical to SEQ ID NO: 191
  source 1..32: mol_type = other DNA
  misc_feature 10..11: note = DNA
  misc_feature order(1..9,12..32): note = RNA
  modified_base 9: mod_base = OTHER; note = 2-Prime-O-Methoxyethyl modified 5-methyl Cytidine
  modified_base 10: mod_base = OTHER; note = DNA nucleotide carrying a 6-amino-5-nitro-3-yl-2(1H)-pyridone nucleobase
  modified_base 11: mod_base = OTHER; note = DNA nucleotide carrying a hypoxanthine nucleobase
  modified_base order(1,7,13,20,26,32): mod_base = OTHER; note = 2-Prime-Fluoro modified nucleoside
  modified_base order(2..6,8,12,14..19,21..25,27..31): mod_base = OTHER; note = 2-Prime-O-Methyl modified nucleoside
  modified_base order(1^2,31^32): mod_base = OTHER; note = (1,3-dimethylimidazolidin-2-ylidene) Phosphoramidate linkage
  modified_base order(2..11,12..31): mod_base = OTHER; note = Phosphorothioate linkage
  modified_base 11^12: mod_base = OTHER; note = Methylphosphonate linkage
  misc_feature 1..32: note = RM109168

SEQ ID NO: 394 - DNA, 23 bp, synthetic construct
  source 1..23: mol_type = other DNA
  misc_feature 6..7: note = DNA
  misc_feature order(1..5,8..23): note = RNA
  modified_base 5: mod_base = OTHER; note = 2-Prime-O-Methoxyethyl modified 5-methyl Cytidine
  modified_base 6: mod_base = OTHER; note = DNA nucleotide carrying a 6-amino-5-nitro-3-yl-2(1H)-pyridone nucleobase
  modified_base 7: mod_base = OTHER; note = DNA nucleotide carrying a hypoxanthine nucleobase
  modified_base order(3,9,16,22): mod_base = OTHER; note = 2-Prime-Fluoro modified nucleoside
  modified_base order(1..2,4,8,10..15,17..21,23): mod_base = OTHER; note = 2-Prime-O-Methyl modified nucleoside
  modified_base order(1^2,22^23): mod_base = OTHER; note = (1,3-dimethylimidazolidin-2-ylidene) Phosphoramidate linkage
  modified_base order(2..7,8..22): mod_base = OTHER; note = Phosphorothioate linkage
  modified_base 7^8: mod_base = OTHER; note = Methylphosphonate linkage
  misc_feature 1..23: note = RM109169
catacnntgccaccagggcgatg

SEQ ID NO: 395 - DNA, 23 bp, synthetic construct
  source 1..23: mol_type = other DNA
  misc_feature 18..19: note = DNA
  misc_feature order(1..17,20..23): note = RNA
  modified_base 17: mod_base = OTHER; note = 2-Prime-O-Methoxyethyl modified 5-methyl Cytidine
  modified_base 18: mod_base = OTHER; note = DNA nucleotide carrying a 6-amino-5-nitro-3-yl-2(1H)-pyridone nucleobase
  modified_base 19: mod_base = OTHER; note = DNA nucleotide carrying a hypoxanthine nucleobase
  modified_base order(4,10,21,23): mod_base = OTHER; note = 2-Prime-Fluoro modified nucleoside
  modified_base order(1..3,5..9,11..16,20,22): mod_base = OTHER; note = 2-Prime-O-Methyl modified nucleoside
  modified_base order(1^2,22^23): mod_base = OTHER; note = (1,3-dimethylimidazolidin-2-ylidene) Phosphoramidate linkage
  modified_base order(2..19,20..22): mod_base = OTHER; note = Phosphorothioate linkage
  modified_base 19^20: mod_base = OTHER; note = Methylphosphonate linkage
  misc_feature 1..23: note = RM109170
ggggcatgatgccatacnntgcc

SEQ ID NO: 396 - DNA, 23 bp, synthetic construct
  source 1..23: mol_type = other DNA
  misc_feature 15..16: note = DNA
  misc_feature order(1..14,17..23): note = RNA
  modified_base 14: mod_base = OTHER; note = 2-Prime-O-Methoxyethyl modified 5-methyl Cytidine
  modified_base 15: mod_base = OTHER; note = DNA nucleotide carrying a 6-amino-5-nitro-3-yl-2(1H)-pyridone nucleobase
  modified_base 16: mod_base = OTHER; note = DNA nucleotide carrying a hypoxanthine nucleobase
  modified_base order(1,7,18,20): mod_base = OTHER; note = 2-Prime-Fluoro modified nucleoside
  modified_base order(2..6,8..13,17,19,21..23): mod_base = OTHER; note = 2-Prime-O-Methyl modified nucleoside
  modified_base order(1^2,22^23): mod_base = OTHER; note = (1,3-dimethylimidazolidin-2-ylidene) Phosphoramidate linkage
  modified_base order(2..16,17..22): mod_base = OTHER; note = Phosphorothioate linkage
  modified_base 16^17: mod_base = OTHER; note = Methylphosphonate linkage
  misc_feature 1..23: note = RM109171
gcatgatgccatacnntgccacc

SEQ ID NO: 397 - DNA, 32 bp, synthetic construct; identical to SEQ ID NO: 187
  source 1..32: mol_type = other DNA
  misc_feature 22..23: note = DNA
  misc_feature order(1..21,24..32): note = RNA
  modified_base 21: mod_base = OTHER; note = 2-Prime-O-Methoxyethyl modified 5-methyl Cytidine
  modified_base 22: mod_base = OTHER; note = DNA nucleotide carrying a 6-amino-5-nitro-3-yl-2(1H)-pyridone nucleobase
  modified_base 23: mod_base = OTHER; note = DNA nucleotide carrying a hypoxanthine nucleobase
  modified_base order(4,7..8,10,25,30): mod_base = OTHER; note = 2-Prime-Fluoro modified nucleoside
  modified_base order(1..3,5..6,9,11..20,24,26..29,31..32): mod_base = OTHER; note = 2-Prime-O-Methyl modified nucleoside
  modified_base order(1^2,31^32): mod_base = OTHER; note = (1,3-dimethylimidazolidin-2-ylidene) Phosphoramidate linkage
  modified_base order(2..23,24..31): mod_base = OTHER; note = Phosphorothioate linkage
  modified_base 23^24: mod_base = OTHER; note = Methylphosphonate linkage
  misc_feature 1..32: note = RM109172

SEQ ID NO: 398 - DNA, 32 bp, synthetic construct; identical to SEQ ID NO: 5
  source 1..32: mol_type = other DNA
  misc_feature 19..20: note = DNA
  misc_feature order(1..18,21..32): note = RNA
  modified_base 18: mod_base = OTHER; note = 2-Prime-O-Methoxyethyl modified 5-methyl Cytidine
  modified_base 19: mod_base = OTHER; note = DNA nucleotide carrying a 6-amino-5-nitro-3-yl-2(1H)-pyridone nucleobase
  modified_base 20: mod_base = OTHER; note = DNA nucleotide carrying a hypoxanthine nucleobase
  modified_base order(1,4..5,7,22,27): mod_base = OTHER; note = 2-Prime-Fluoro modified nucleoside
  modified_base order(2..3,6,8..17,21,23..26,28..32): mod_base = OTHER; note = 2-Prime-O-Methyl modified nucleoside
  modified_base order(1^2,31^32): mod_base = OTHER; note = (1,3-dimethylimidazolidin-2-ylidene) Phosphoramidate linkage
  modified_base order(2..20,21..31): mod_base = OTHER; note = Phosphorothioate linkage
  modified_base 20^21: mod_base = OTHER; note = Methylphosphonate linkage
  misc_feature 1..32: note = RM109173

SEQ ID NO: 399 - DNA, 32 bp, synthetic construct; identical to SEQ ID NO: 191
  source 1..32: mol_type = other DNA
  misc_feature 10..11: note = DNA
  misc_feature order(1..9,12..32): note = RNA
  modified_base 9: mod_base = OTHER; note = 2-Prime-O-Methoxyethyl modified 5-methyl Cytidine
  modified_base 10: mod_base = OTHER; note = DNA nucleotide carrying a 6-amino-5-nitro-3-yl-2(1H)-pyridone nucleobase
  modified_base 11: mod_base = OTHER; note = DNA nucleotide carrying a hypoxanthine nucleobase
  modified_base order(4,13,24,26..27,30): mod_base = OTHER; note = 2-Prime-Fluoro modified nucleoside
  modified_base order(1..3,5..8,12,14..23,25,28..29,31..32): mod_base = OTHER; note = 2-Prime-O-Methyl modified nucleoside
  modified_base order(1^2,31^32): mod_base = OTHER; note = (1,3-dimethylimidazolidin-2-ylidene) Phosphoramidate linkage
  modified_base order(2..11,12..31): mod_base = OTHER; note = Phosphorothioate linkage
  modified_base 11^12: mod_base = OTHER; note = Methylphosphonate linkage
  misc_feature 1..32: note = RM109174

SEQ ID NO: 400 - DNA, 32 bp, synthetic construct; identical to SEQ ID NO: 192
  source 1..32: mol_type = other DNA
  misc_feature 7..8: note = DNA
  misc_feature order(1..6,9..32): note = RNA
  modified_base 6: mod_base = OTHER; note = 2-Prime-O-Methoxyethyl modified 5-methyl Cytidine
  modified_base 7: mod_base = OTHER; note = DNA nucleotide carrying a 6-amino-5-nitro-3-yl-2(1H)-pyridone nucleobase
  modified_base 8: mod_base = OTHER; note = DNA nucleotide carrying a hypoxanthine nucleobase
  modified_base order(1,10,21,23..24,27): mod_base = OTHER; note = 2-Prime-Fluoro modified nucleoside
  modified_base order(2..5,9,11..20,22,25..26,28..32): mod_base = OTHER; note = 2-Prime-O-Methyl modified nucleoside
  modified_base order(1^2,31^32): mod_base = OTHER; note = (1,3-dimethylimidazolidin-2-ylidene) Phosphoramidate linkage
  modified_base order(2..8,9..31): mod_base = OTHER; note = Phosphorothioate linkage
  modified_base 8^9: mod_base = OTHER; note = Methylphosphonate linkage
  misc_feature 1..32: note = RM109175

SEQ ID NO: 401 - DNA, 23 bp, synthetic construct
  source 1..23: mol_type = other DNA
  misc_feature 18..19: note = DNA
  misc_feature order(1..17,20..23): note = RNA
  modified_base 17: mod_base = OTHER; note = 2-Prime-O-Methoxyethyl modified 5-methyl Cytidine
  modified_base 18: mod_base = OTHER; note = DNA nucleotide carrying a 6-amino-5-nitro-3-yl-2(1H)-pyridone nucleobase
  modified_base 19: mod_base = OTHER; note = DNA nucleotide carrying a hypoxanthine nucleobase
  modified_base order(3..4,6,21): mod_base = OTHER; note = 2-Prime-Fluoro modified nucleoside
  modified_base order(1..2,5,7..16,20,22..23): mod_base = OTHER; note = 2-Prime-O-Methyl modified nucleoside
  modified_base order(1^2,22^23): mod_base = OTHER; note = (1,3-dimethylimidazolidin-2-ylidene) Phosphoramidate linkage
  modified_base order(2..19,20..22): mod_base = OTHER; note = Phosphorothioate linkage
  modified_base 19^20: mod_base = OTHER; note = Methylphosphonate linkage
  misc_feature 1..23: note = RM109176
ggggcatgatgccatacnntgcc

SEQ ID NO: 402 - DNA, 23 bp, synthetic construct
  source 1..23: mol_type = other DNA
  misc_feature 18..19: note = DNA
  misc_feature order(1..17,20..23): note = RNA
  modified_base 17: mod_base = OTHER; note = 2-Prime-O-Methoxyethyl modified 5-methyl Cytidine
  modified_base 18: mod_base = OTHER; note = DNA nucleotide carrying a 6-amino-5-nitro-3-yl-2(1H)-pyridone nucleobase
  modified_base 19: mod_base = OTHER; note = DNA nucleotide carrying a hypoxanthine nucleobase
  modified_base order(6,21): mod_base = OTHER; note = 2-Prime-Fluoro modified nucleoside
  modified_base order(1..5,7..16,20,22..23): mod_base = OTHER; note = 2-Prime-O-Methyl modified nucleoside
  modified_base order(1^2,22^23): mod_base = OTHER; note = (1,3-dimethylimidazolidin-2-ylidene) Phosphoramidate linkage
  modified_base order(2..19,20..22): mod_base = OTHER; note = Phosphorothioate linkage
  modified_base 19^20: mod_base = OTHER; note = Methylphosphonate linkage
  misc_feature 1..23: note = RM109177
ggggcatgatgccatacnntgcc

SEQ ID NO: 403 - DNA, 23 bp, synthetic construct
  source 1..23: mol_type = other DNA
  misc_feature 15..16: note = DNA
  misc_feature order(1..14,17..23): note = RNA
  modified_base 14: mod_base = OTHER; note = 2-Prime-O-Methoxyethyl modified 5-methyl Cytidine
  modified_base 15: mod_base = OTHER; note = DNA nucleotide carrying a 6-amino-5-nitro-3-yl-2(1H)-pyridone nucleobase
  modified_base 16: mod_base = OTHER; note = DNA nucleotide carrying a hypoxanthine nucleobase
  modified_base order(3,18): mod_base = OTHER; note = 2-Prime-Fluoro modified nucleoside
  modified_base order(1..2,4..13,17,19..23): mod_base = OTHER; note = 2-Prime-O-Methyl modified nucleoside
  modified_base order(1^2,22^23): mod_base = OTHER; note = (1,3-dimethylimidazolidin-2-ylidene) Phosphoramidate linkage
  modified_base order(2..16,17..22): mod_base = OTHER; note = Phosphorothioate linkage
  modified_base 16^17: mod_base = OTHER; note = Methylphosphonate linkage
  misc_feature 1..23: note = RM109178
gcatgatgccatacnntgccacc

SEQ ID NO: 404 - DNA, 26 bp, synthetic construct
  source 1..26: mol_type = other DNA
  misc_feature 22..23: note = DNA
  misc_feature order(1..21,24..26): note = RNA
  modified_base 21: mod_base = OTHER; note = 2-Prime-O-Methoxyethyl modified 5-methyl Cytidine
  modified_base 22: mod_base = OTHER; note = DNA nucleotide carrying a 6-amino-5-nitro-3-yl-2(1H)-pyridone nucleobase
  modified_base 23: mod_base = OTHER; note = DNA nucleotide carrying a hypoxanthine nucleobase
  modified_base order(10,25): mod_base = OTHER; note = 2-Prime-Fluoro modified nucleoside
  modified_base order(1..9,11..20,24,26): mod_base = OTHER; note = 2-Prime-O-Methyl modified nucleoside
  modified_base order(1^2,25^26): mod_base = OTHER; note = (1,3-dimethylimidazolidin-2-ylidene) Phosphoramidate linkage
  modified_base order(2..23,24^25): mod_base = OTHER; note = Phosphorothioate linkage
  modified_base 23^24: mod_base = OTHER; note = Methylphosphonate linkage
  misc_feature 1..26: note = RM109179
gtgaggggcatgatgccatacnntgc

SEQ ID NO: 405 - DNA, 26 bp, synthetic construct
  source 1..26: mol_type = other DNA
  misc_feature 19..20: note = DNA
  misc_feature order(1..18,21..26): note = RNA
  modified_base 18: mod_base = OTHER; note = 2-Prime-O-Methoxyethyl modified 5-methyl Cytidine
  modified_base 19: mod_base = OTHER; note = DNA nucleotide carrying a 6-amino-5-nitro-3-yl-2(1H)-pyridone nucleobase
  modified_base 20: mod_base = OTHER; note = DNA nucleotide carrying a hypoxanthine nucleobase
  modified_base order(7,22): mod_base = OTHER; note = 2-Prime-Fluoro modified nucleoside
  modified_base order(1..6,8..17,21,23..26): mod_base = OTHER; note = 2-Prime-O-Methyl modified nucleoside
  modified_base order(1^2,25^26): mod_base = OTHER; note = (1,3-dimethylimidazolidin-2-ylidene) Phosphoramidate linkage
  modified_base order(2..20,21..25): mod_base = OTHER; note = Phosphorothioate linkage
  modified_base 20^21: mod_base = OTHER; note = Methylphosphonate linkage
  misc_feature 1..26: note = RM109180
aggggcatgatgccatacnntgccac

SEQ ID NO: 406 - DNA, 26 bp, synthetic construct
  source 1..26: mol_type = other DNA
  misc_feature 16..17: note = DNA
  misc_feature order(1..15,18..26): note = RNA
  modified_base 15: mod_base = OTHER; note = 2-Prime-O-Methoxyethyl modified 5-methyl Cytidine
  modified_base 16: mod_base = OTHER; note = DNA nucleotide carrying a 6-amino-5-nitro-3-yl-2(1H)-pyridone nucleobase
  modified_base 17: mod_base = OTHER; note = DNA nucleotide carrying a hypoxanthine nucleobase
  modified_base order(4,19): mod_base = OTHER; note = 2-Prime-Fluoro modified nucleoside
  modified_base order(1..3,5..14,18,20..26): mod_base = OTHER; note = 2-Prime-O-Methyl modified nucleoside
  modified_base order(1^2,25^26): mod_base = OTHER; note = (1,3-dimethylimidazolidin-2-ylidene) Phosphoramidate linkage
  modified_base order(2..17,18..25): mod_base = OTHER; note = Phosphorothioate linkage
  modified_base 17^18: mod_base = OTHER; note = Methylphosphonate linkage
  misc_feature 1..26: note = RM109181
ggcatgatgccatacnntgccaccag

SEQ ID NO: 407 - DNA, 26 bp, synthetic construct
  source 1..26: mol_type = other DNA
  misc_feature 13..14: note = DNA
  misc_feature order(1..12,15..26): note = RNA
  modified_base 12: mod_base = OTHER; note = 2-Prime-O-Methoxyethyl modified 5-methyl Cytidine
  modified_base 13: mod_base = OTHER; note = DNA nucleotide carrying a 6-amino-5-nitro-3-yl-2(1H)-pyridone nucleobase
  modified_base 14: mod_base = OTHER; note = DNA nucleotide carrying a hypoxanthine nucleobase
  modified_base order(1,16): mod_base = OTHER; note = 2-Prime-Fluoro modified nucleoside
  modified_base order(2..11,15,17..26): mod_base = OTHER; note = 2-Prime-O-Methyl modified nucleoside
  modified_base order(1^2,25^26): mod_base = OTHER; note = (1,3-dimethylimidazolidin-2-ylidene) Phosphoramidate linkage
  modified_base order(2..14,15..25): mod_base = OTHER; note = Phosphorothioate linkage
  modified_base 14^15: mod_base = OTHER; note = Methylphosphonate linkage
  misc_feature 1..26: note = RM109182
atgatgccatacnntgccaccagggc

SEQ ID NO: 408 - DNA, 29 bp, synthetic construct
  source 1..29: mol_type = other DNA
  misc_feature 24..25: note = DNA
  misc_feature order(1..23,26..29): note = RNA
  modified_base 23: mod_base = OTHER; note = 2-Prime-O-Methoxyethyl modified 5-methyl Cytidine
  modified_base 24: mod_base = OTHER; note = DNA nucleotide carrying a 6-amino-5-nitro-3-yl-2(1H)-pyridone nucleobase
  modified_base 25: mod_base = OTHER; note = DNA nucleotide carrying a hypoxanthine nucleobase
  modified_base order(12,27): mod_base = OTHER; note = 2-Prime-Fluoro modified nucleoside
  modified_base order(1..11,13..22,26,28..29): mod_base = OTHER; note = 2-Prime-O-Methyl modified nucleoside
  modified_base order(1^2,28^29): mod_base = OTHER; note = (1,3-dimethylimidazolidin-2-ylidene) Phosphoramidate linkage
  modified_base order(2..25,26..28): mod_base = OTHER; note = Phosphorothioate linkage
  modified_base 25^26: mod_base = OTHER; note = Methylphosphonate linkage
  misc_feature 1..29: note = RM109183
ccgtgaggggcatgatgccatacnntgcc

SEQ ID NO: 409 - DNA, 29 bp, synthetic construct
  source 1..29: mol_type = other DNA
  misc_feature 21..22: note = DNA
  misc_feature order(1..20,23..29): note = RNA
  modified_base 20: mod_base = OTHER; note = 2-Prime-O-Methoxyethyl modified 5-methyl Cytidine
  modified_base 21: mod_base = OTHER; note = DNA nucleotide carrying a 6-amino-5-nitro-3-yl-2(1H)-pyridone nucleobase
  modified_base 22: mod_base = OTHER; note = DNA nucleotide carrying a hypoxanthine nucleobase
  modified_base order(9,24): mod_base = OTHER; note = 2-Prime-Fluoro modified nucleoside
  modified_base order(1..8,10..19,23,25..29): mod_base = OTHER; note = 2-Prime-O-Methyl modified nucleoside
  modified_base order(1^2,28^29): mod_base = OTHER; note = (1,3-dimethylimidazolidin-2-ylidene) Phosphoramidate linkage
  modified_base order(2..22,23..28): mod_base = OTHER; note = Phosphorothioate linkage
  modified_base 22^23: mod_base = OTHER; note = Methylphosphonate linkage
  misc_feature 1..29: note = RM109184
tgaggggcatgatgccatacnntgccacc

SEQ ID NO: 410 - DNA, 29 bp, synthetic construct
  source 1..29: mol_type = other DNA
  misc_feature 18..19: note = DNA
  misc_feature order(1..17,20..29): note = RNA
  modified_base 17: mod_base = OTHER; note = 2-Prime-O-Methoxyethyl modified 5-methyl Cytidine
  modified_base 18: mod_base = OTHER; note = DNA nucleotide carrying a 6-amino-5-nitro-3-yl-2(1H)-pyridone nucleobase
  modified_base 19: mod_base = OTHER; note = DNA nucleotide carrying a hypoxanthine nucleobase
  modified_base order(6,21): mod_base = OTHER; note = 2-Prime-Fluoro modified nucleoside
  modified_base order(1..5,7..16,20,22..29): mod_base = OTHER; note = 2-Prime-O-Methyl modified nucleoside
  modified_base order(1^2,28^29): mod_base = OTHER; note = (1,3-dimethylimidazolidin-2-ylidene) Phosphoramidate linkage
  modified_base order(2..19,20..28): mod_base = OTHER; note = Phosphorothioate linkage
  modified_base 19^20: mod_base = OTHER; note = Methylphosphonate linkage
  misc_feature 1..29: note = RM109185
ggggcatgatgccatacnntgccaccagg

SEQ ID NO: 411 - DNA, 29 bp, synthetic construct
  source 1..29: mol_type = other DNA
  misc_feature 15..16: note = DNA
  misc_feature order(1..14,17..29): note = RNA
  modified_base 14: mod_base = OTHER; note = 2-Prime-O-Methoxyethyl modified 5-methyl Cytidine
  modified_base 15: mod_base = OTHER; note = DNA nucleotide carrying a 6-amino-5-nitro-3-yl-2(1H)-pyridone nucleobase
  modified_base 16: mod_base = OTHER; note = DNA nucleotide carrying a hypoxanthine nucleobase
  modified_base order(3,18): mod_base = OTHER; note = 2-Prime-Fluoro modified nucleoside
  modified_base order(1..2,4..13,17,19..29): mod_base = OTHER; note = 2-Prime-O-Methyl modified nucleoside
  modified_base order(1^2,28^29): mod_base = OTHER; note = (1,3-dimethylimidazolidin-2-ylidene) Phosphoramidate linkage
  modified_base order(2..16,17..28): mod_base = OTHER; note = Phosphorothioate linkage
  modified_base 16^17: mod_base = OTHER; note = Methylphosphonate linkage
  misc_feature 1..29: note = RM109186
gcatgatgccatacnntgccaccagggcg

SEQ ID NO: 412 - DNA, 32 bp, synthetic construct; identical to SEQ ID NO: 186
  source 1..32: mol_type = other DNA
  misc_feature 25..26: note = DNA
  misc_feature order(1..24,27..32): note = RNA
  modified_base 24: mod_base = OTHER; note = 2-Prime-O-Methoxyethyl modified 5-methyl Cytidine
  modified_base 25: mod_base = OTHER; note = DNA nucleotide carrying a 6-amino-5-nitro-3-yl-2(1H)-pyridone nucleobase
  modified_base 26: mod_base = OTHER; note = DNA nucleotide carrying a hypoxanthine nucleobase
  modified_base order(1,11,14,23,28,30): mod_base = OTHER; note = 2-Prime-Fluoro modified nucleoside
  modified_base order(2..10,12..13,15..22,27,29,31..32): mod_base = OTHER; note = 2-Prime-O-Methyl modified nucleoside
  modified_base order(1^2,31^32): mod_base = OTHER; note = (1,3-dimethylimidazolidin-2-ylidene) Phosphoramidate linkage
  modified_base order(2..26,27..31): mod_base = OTHER; note = Phosphorothioate linkage
  modified_base 26^27: mod_base = OTHER; note = Methylphosphonate linkage
  misc_feature 1..32: note = RM109187

SEQ ID NO: 413 - DNA, 23 bp, synthetic construct
  source 1..23: mol_type = other DNA
  misc_feature 18..19: note = DNA
  misc_feature order(1..17,20..23): note = RNA
  modified_base 17: mod_base = OTHER; note = 2-Prime-O-Methoxyethyl modified 5-methyl Cytidine
  modified_base 18: mod_base = OTHER; note = DNA nucleotide carrying a 6-amino-5-nitro-3-yl-2(1H)-pyridone nucleobase
  modified_base 19: mod_base = OTHER; note = DNA nucleotide carrying a hypoxanthine nucleobase
  modified_base order(4,7,16,21): mod_base = OTHER; note = 2-Prime-Fluoro modified nucleoside
  modified_base order(1..3,5..6,8..15,20,22..23): mod_base = OTHER; note = 2-Prime-O-Methyl modified nucleoside
  modified_base order(1^2,22^23): mod_base = OTHER; note = (1,3-dimethylimidazolidin-2-ylidene) Phosphoramidate linkage
  modified_base order(2..19,20..22): mod_base = OTHER; note = Phosphorothioate linkage
  modified_base 19^20: mod_base = OTHER; note = Methylphosphonate linkage
  misc_feature 1..23: note = RM109188
ggggcatgatgccatacnntgcc

SEQ ID NO: 414 - DNA, 23 bp, synthetic construct
  source 1..23: mol_type = other DNA
  misc_feature 15..16: note = DNA
  misc_feature order(1..14,17..23): note = RNA
  modified_base 14: mod_base = OTHER; note = 2-Prime-O-Methoxyethyl modified 5-methyl Cytidine
  modified_base 15: mod_base = OTHER; note = DNA nucleotide carrying a 6-amino-5-nitro-3-yl-2(1H)-pyridone nucleobase
  modified_base 16: mod_base = OTHER; note = DNA nucleotide carrying a hypoxanthine nucleobase
  modified_base order(1,4,13,18): mod_base = OTHER; note = 2-Prime-Fluoro modified nucleoside
  modified_base order(2..3,5..12,17,19..23): mod_base = OTHER; note = 2-Prime-O-Methyl modified nucleoside
  modified_base order(1^2,22^23): mod_base = OTHER; note = (1,3-dimethylimidazolidin-2-ylidene) Phosphoramidate linkage
  modified_base order(2..16,17..22): mod_base = OTHER; note = Phosphorothioate linkage
  modified_base 16^17: mod_base = OTHER; note = Methylphosphonate linkage
  misc_feature 1..23: note = RM109189
gcatgatgccatacnntgccacc

SEQ ID NO: 415 - DNA, 32 bp, synthetic construct; identical to SEQ ID NO: 185
  source 1..32: mol_type = other DNA
  misc_feature 28..29: note = DNA
  misc_feature order(1..27,30..32): note = RNA
  modified_base 27: mod_base = OTHER; note = 2-Prime-O-Methoxyethyl modified 5-methyl Cytidine
  modified_base 28: mod_base = OTHER; note = DNA nucleotide carrying a 6-amino-5-nitro-3-yl-2(1H)-pyridone nucleobase
  modified_base 29: mod_base = OTHER; note = DNA nucleotide carrying a hypoxanthine nucleobase
  modified_base order(1,12..13,21,24,31): mod_base = OTHER; note = 2-Prime-Fluoro modified nucleoside
  modified_base order(2..11,14..20,22..23,25..26,30,32): mod_base = OTHER; note = 2-Prime-O-Methyl modified nucleoside
  modified_base order(1^2,31^32): mod_base = OTHER; note = (1,3-dimethylimidazolidin-2-ylidene) Phosphoramidate linkage
  modified_base order(2..29,30^31): mod_base = OTHER; note = Phosphorothioate linkage
  modified_base 29^30: mod_base = OTHER; note = Methylphosphonate linkage
  misc_feature 1..32: note = RM109190

SEQ ID NO: 416 - DNA, 23 bp, synthetic construct
  source 1..23: mol_type = other DNA
  misc_feature 18..19: note = DNA
  misc_feature order(1..17,20..23): note = RNA
  modified_base 17: mod_base = OTHER; note = 2-Prime-O-Methoxyethyl modified 5-methyl Cytidine
  modified_base 18: mod_base = OTHER; note = DNA nucleotide carrying a 6-amino-5-nitro-3-yl-2(1H)-pyridone nucleobase
  modified_base 19: mod_base = OTHER; note = DNA nucleotide carrying a hypoxanthine nucleobase
  modified_base order(3,11,14,21): mod_base = OTHER; note = 2-Prime-Fluoro modified nucleoside
  modified_base order(1..2,4..10,12..13,15..16,20,22..23): mod_base = OTHER; note = 2-Prime-O-Methyl modified nucleoside
  modified_base order(1^2,22^23): mod_base = OTHER; note = (1,3-dimethylimidazolidin-2-ylidene) Phosphoramidate linkage
  modified_base order(2..19,20..22): mod_base = OTHER; note = Phosphorothioate linkage
  modified_base 19^20: mod_base = OTHER; note = Methylphosphonate linkage
  misc_feature 1..23: note = RM109191
ggggcatgatgccatacnntgcc

SEQ ID NO: 417 - DNA, 32 bp, synthetic construct; identical to SEQ ID NO: 189
  source 1..32: mol_type = other DNA
  misc_feature 16..17: note = DNA
  misc_feature order(1..15,18..32): note = RNA
  modified_base 15: mod_base = OTHER; note = 2-Prime-O-Methoxyethyl modified 5-methyl Cytidine
  modified_base 16: mod_base = OTHER; note = DNA nucleotide carrying a 6-amino-5-nitro-3-yl-2(1H)-pyridone nucleobase
  modified_base 17: mod_base = OTHER; note = DNA nucleotide carrying a hypoxanthine nucleobase
  modified_base order(2,5..6,13,19..22,31): mod_base = OTHER; note = 2-Prime-Fluoro modified nucleoside
  modified_base order(1,3..4,7..12,14,18,23..30,32): mod_base = OTHER; note = 2-Prime-O-Methyl modified nucleoside
  modified_base order(1^2,31^32): mod_base = OTHER; note = (1,3-dimethylimidazolidin-2-ylidene) Phosphoramidate linkage
  modified_base order(2..17,18..31): mod_base = OTHER; note = Phosphorothioate linkage
  modified_base 17^18: mod_base = OTHER; note = Methylphosphonate linkage
  misc_feature 1..32: note = RM109192

SEQ ID NO: 418 - DNA, 32 bp, synthetic construct; identical to SEQ ID NO: 189
  source 1..32: mol_type = other DNA
  misc_feature 16..17: note = DNA
  misc_feature order(1..15,18..32): note = RNA
  modified_base 15: mod_base = OTHER; note = 2-Prime-O-Methoxyethyl modified 5-methyl Cytidine
  modified_base 16: mod_base = OTHER; note = DNA nucleotide carrying a 6-amino-5-nitro-3-yl-2(1H)-pyridone nucleobase
  modified_base 17: mod_base = OTHER; note = DNA nucleotide carrying a hypoxanthine nucleobase
  modified_base order(3,12..14,19,21,28..29,32): mod_base = OTHER; note = 2-Prime-Fluoro modified nucleoside
  modified_base order(1..2,4..11,18,20,22..27,30..31): mod_base = OTHER; note = 2-Prime-O-Methyl modified nucleoside
  modified_base order(1^2,31^32): mod_base = OTHER; note = (1,3-dimethylimidazolidin-2-ylidene) Phosphoramidate linkage
  modified_base order(2..17,18..31): mod_base = OTHER; note = Phosphorothioate linkage
  modified_base 17^18: mod_base = OTHER; note = Methylphosphonate linkage
  misc_feature 1..32: note = RM109193

SEQ ID NO: 419 - DNA, 23 bp, synthetic construct
  source 1..23: mol_type = other DNA
  misc_feature 18..19: note = DNA
  misc_feature order(1..17,20..23): note = RNA
  modified_base 17: mod_base = OTHER; note = 2-Prime-O-Methoxyethyl modified 5-methyl Cytidine
  modified_base 18: mod_base = OTHER; note = DNA nucleotide carrying a 6-amino-5-nitro-3-yl-2(1H)-pyridone nucleobase
  modified_base 19: mod_base = OTHER; note = DNA nucleotide carrying a hypoxanthine nucleobase
  modified_base order(7..8,15,21..23): mod_base = OTHER; note = 2-Prime-Fluoro modified nucleoside
  modified_base order(1..6,9..14,16,20): mod_base = OTHER; note = 2-Prime-O-Methyl modified nucleoside
  modified_base order(1^2,22^23): mod_base = OTHER; note = (1,3-dimethylimidazolidin-2-ylidene) Phosphoramidate linkage
  modified_base order(2..19,20..22): mod_base = OTHER; note = Phosphorothioate linkage
  modified_base 19^20: mod_base = OTHER; note = Methylphosphonate linkage
  misc_feature 1..23: note = RM109194
ggggcatgatgccatacnntgcc

SEQ ID NO: 420 - DNA, 23 bp, synthetic construct
  source 1..23: mol_type = other DNA
  misc_feature 15..16: note = DNA
  misc_feature order(1..14,17..23): note = RNA
  modified_base 14: mod_base = OTHER; note = 2-Prime-O-Methoxyethyl modified 5-methyl Cytidine
  modified_base 15: mod_base = OTHER; note = DNA nucleotide carrying a 6-amino-5-nitro-3-yl-2(1H)-pyridone nucleobase
  modified_base 16: mod_base = OTHER; note = DNA nucleotide carrying a hypoxanthine nucleobase
  modified_base order(4..5,12,18..20): mod_base = OTHER; note = 2-Prime-Fluoro modified nucleoside
  modified_base order(1..3,6..11,13,17,21..23): mod_base = OTHER; note = 2-Prime-O-Methyl modified nucleoside
  modified_base order(1^2,22^23): mod_base = OTHER; note = (1,3-dimethylimidazolidin-2-ylidene) Phosphoramidate linkage
  modified_base order(2..16,17..22): mod_base = OTHER; note = Phosphorothioate linkage
  modified_base 16^17: mod_base = OTHER; note = Methylphosphonate linkage
  misc_feature 1..23: note = RM109195
gcatgatgccatacnntgccacc

SEQ ID NO: 421 - DNA, 23 bp, synthetic construct
  source 1..23: mol_type = other DNA
  misc_feature 12..13: note = DNA
  misc_feature order(1..11,14..23): note = RNA
  modified_base 11: mod_base = OTHER; note = 2-Prime-O-Methoxyethyl modified 5-methyl Cytidine
  modified_base 12: mod_base = OTHER; note = DNA nucleotide carrying a 6-amino-5-nitro-3-yl-2(1H)-pyridone nucleobase
  modified_base 13: mod_base = OTHER; note = DNA nucleotide carrying a hypoxanthine nucleobase
  modified_base order(1..2,9,15..17): mod_base = OTHER; note = 2-Prime-Fluoro modified nucleoside
  modified_base order(3..8,10,14,18..23): mod_base = OTHER; note = 2-Prime-O-Methyl modified nucleoside
  modified_base order(1^2,22^23): mod_base = OTHER; note = (1,3-dimethylimidazolidin-2-ylidene) Phosphoramidate linkage
  modified_base order(2..13,14..22): mod_base = OTHER; note = Phosphorothioate linkage
  modified_base 13^14: mod_base = OTHER; note = Methylphosphonate linkage
  misc_feature 1..23: note = RM109196
tgatgccatacnntgccaccagg

SEQ ID NO: 422 - DNA, 32 bp, synthetic construct; identical to SEQ ID NO: 186
  source 1..32: mol_type = other DNA
  misc_feature 25..26: note = DNA
  misc_feature order(1..24,27..32): note = RNA
  modified_base 24: mod_base = OTHER; note = 2-Prime-O-Methoxyethyl modified 5-methyl Cytidine
  modified_base 25: mod_base = OTHER; note = DNA nucleotide carrying a 6-amino-5-nitro-3-yl-2(1H)-pyridone nucleobase
  modified_base 26: mod_base = OTHER; note = DNA nucleotide carrying a hypoxanthine nucleobase
  modified_base order(14..15,22,28..30): mod_base = OTHER; note = 2-Prime-Fluoro modified nucleoside
  modified_base order(1..13,16..21,23,27,31..32): mod_base = OTHER; note = 2-Prime-O-Methyl modified nucleoside
  modified_base order(1^2,31^32): mod_base = OTHER; note = (1,3-dimethylimidazolidin-2-ylidene) Phosphoramidate linkage
  modified_base order(2..26,27..31): mod_base = OTHER; note = Phosphorothioate linkage
  modified_base 26^27: mod_base = OTHER; note = Methylphosphonate linkage
  misc_feature 1..32: note = RM109197

SEQ ID NO: 423 - DNA, 32 bp, synthetic construct; identical to SEQ ID NO: 187
  source 1..32: mol_type = other DNA
  misc_feature 22..23: note = DNA
  misc_feature order(1..21,24..32): note = RNA
  modified_base 21: mod_base = OTHER; note = 2-Prime-O-Methoxyethyl modified 5-methyl Cytidine
  modified_base 22: mod_base = OTHER; note = DNA nucleotide carrying a 6-amino-5-nitro-3-yl-2(1H)-pyridone nucleobase
  modified_base 23: mod_base = OTHER; note = DNA nucleotide carrying a hypoxanthine nucleobase
  modified_base order(11..12,19,25..27): mod_base = OTHER; note = 2-Prime-Fluoro modified nucleoside
  modified_base order(1..10,13..18,20,24,28..32): mod_base = OTHER; note = 2-Prime-O-Methyl modified nucleoside
  modified_base order(1^2,31^32): mod_base = OTHER; note = (1,3-dimethylimidazolidin-2-ylidene) Phosphoramidate linkage
  modified_base order(2..23,24..31): mod_base = OTHER; note = Phosphorothioate linkage
  modified_base 23^24: mod_base = OTHER; note = Methylphosphonate linkage
  misc_feature 1..32: note = RM109198

SEQ ID NO: 424 - DNA, 32 bp, synthetic construct; identical to SEQ ID NO: 5
  source 1..32: mol_type = other DNA
  misc_feature 19..20: note = DNA
  misc_feature order(1..18,21..32): note = RNA
  modified_base 18: mod_base = OTHER; note = 2-Prime-O-Methoxyethyl modified 5-methyl Cytidine
  modified_base 19: mod_base = OTHER; note = DNA nucleotide carrying a 6-amino-5-nitro-3-yl-2(1H)-pyridone nucleobase
  modified_base 20: mod_base = OTHER; note = DNA nucleotide carrying a hypoxanthine nucleobase
  modified_base order(8..9,16,22..24): mod_base = OTHER; note = 2-Prime-Fluoro modified nucleoside
  modified_base order(1..7,10..15,17,21,25..32): mod_base = OTHER; note = 2-Prime-O-Methyl modified nucleoside
  modified_base order(1^2,31^32): mod_base = OTHER; note = (1,3-dimethylimidazolidin-2-ylidene) Phosphoramidate linkage
  modified_base order(2..20,21..31): mod_base = OTHER; note = Phosphorothioate linkage
  modified_base 20^21: mod_base = OTHER; note = Methylphosphonate linkage
  misc_feature 1..32: note = RM109199

SEQ ID NO: 425 - DNA, 32 bp, synthetic construct; identical to SEQ ID NO: 189
  source 1..32: mol_type = other DNA
  misc_feature 16..17: note = DNA
  misc_feature order(1..15,18..32): note = RNA
  modified_base 15: mod_base = OTHER; note = 2-Prime-O-Methoxyethyl modified 5-methyl Cytidine
  modified_base 16: mod_base = OTHER; note = DNA nucleotide carrying a 6-amino-5-nitro-3-yl-2(1H)-pyridone nucleobase
  modified_base 17: mod_base = OTHER; note = DNA nucleotide carrying a hypoxanthine nucleobase
  modified_base order(5..6,13,19..21): mod_base = OTHER; note = 2-Prime-Fluoro modified nucleoside
  modified_base order(1..4,7..12,14,18,22..32): mod_base = OTHER; note = 2-Prime-O-Methyl modified nucleoside
  modified_base order(1^2,31^32): mod_base = OTHER; note = (1,3-dimethylimidazolidin-2-ylidene) Phosphoramidate linkage
  modified_base order(2..17,18..31): mod_base = OTHER; note = Phosphorothioate linkage
  modified_base 17^18: mod_base = OTHER; note = Methylphosphonate linkage
  misc_feature 1..32: note = RM109200

SEQ ID NO: 426 - DNA, 32 bp, synthetic construct; identical to SEQ ID NO: 190
  source 1..32: mol_type = other DNA
  misc_feature 13..14: note = DNA
  misc_feature order(1..12,15..32): note = RNA
  modified_base 12: mod_base = OTHER; note = 2-Prime-O-Methoxyethyl modified 5-methyl Cytidine
  modified_base 13: mod_base = OTHER; note = DNA nucleotide carrying a 6-amino-5-nitro-3-yl-2(1H)-pyridone nucleobase
  modified_base 14: mod_base = OTHER; note = DNA nucleotide carrying a hypoxanthine nucleobase
  modified_base order(2..3,10,16..18): mod_base = OTHER; note = 2-Prime-Fluoro modified nucleoside
  modified_base order(1,4..9,11,15,19..32): mod_base = OTHER; note = 2-Prime-O-Methyl modified nucleoside
  modified_base order(1^2,31^32): mod_base = OTHER; note = (1,3-dimethylimidazolidin-2-ylidene) Phosphoramidate linkage
  modified_base order(2..14,15..31): mod_base = OTHER; note = Phosphorothioate linkage
  modified_base 14^15: mod_base = OTHER; note = Methylphosphonate linkage
  misc_feature 1..32: note = RM109201

SEQ ID NO: 427 - DNA, 23 bp, synthetic construct
  source 1..23: mol_type = other DNA
  misc_feature 9..10: note = DNA
  misc_feature order(1..8,11..23): note = RNA
  modified_base 8: mod_base = OTHER; note = 2-Prime-O-Methoxyethyl modified 5-methyl Cytidine
  modified_base 9: mod_base = OTHER; note = DNA nucleotide carrying a 6-amino-5-nitro-3-yl-2(1H)-pyridone nucleobase
  modified_base 10: mod_base = OTHER; note = DNA nucleotide carrying a hypoxanthine nucleobase
  modified_base order(6..7,12,14,21..22): mod_base = OTHER; note = 2-Prime-Fluoro modified nucleoside
  modified_base order(1..5,11,13,15..20,23): mod_base = OTHER; note = 2-Prime-O-Methyl modified nucleoside
  modified_base order(1^2,22^23): mod_base = OTHER; note = (1,3-dimethylimidazolidin-2-ylidene) Phosphoramidate linkage
  modified_base order(2..10,11..22): mod_base = OTHER; note = Phosphorothioate linkage
  modified_base 10^11: mod_base = OTHER; note = Methylphosphonate linkage
  misc_feature 1..23: note = RM109202
tgccatacnntgccaccagggcg

SEQ ID NO: 428 - DNA, 23 bp, synthetic construct
  source 1..23: mol_type = other DNA
  misc_feature 6..7: note = DNA
  misc_feature order(1..5,8..23): note = RNA
  modified_base 5: mod_base = OTHER; note = 2-Prime-O-Methoxyethyl modified 5-methyl Cytidine
  modified_base 6: mod_base = OTHER; note = DNA nucleotide carrying a 6-amino-5-nitro-3-yl-2(1H)-pyridone nucleobase
  modified_base 7: mod_base = OTHER; note = DNA nucleotide carrying a hypoxanthine nucleobase
  modified_base order(3..4,9,11,18..19): mod_base = OTHER; note = 2-Prime-Fluoro modified nucleoside
  modified_base order(1..2,8,10,12..17,20..23): mod_base = OTHER; note = 2-Prime-O-Methyl modified nucleoside
  modified_base order(1^2,22^23): mod_base = OTHER; note = (1,3-dimethylimidazolidin-2-ylidene) Phosphoramidate linkage
  modified_base order(2..7,8..22): mod_base = OTHER; note = Phosphorothioate linkage
  modified_base 7^8: mod_base = OTHER; note = Methylphosphonate linkage
  misc_feature 1..23: note = RM109203
catacnntgccaccagggcgatg

SEQ ID NO: 429 - DNA, 32 bp, synthetic construct; identical to SEQ ID NO: 5
  source 1..32: mol_type = other DNA
  misc_feature 19..20: note = DNA
  misc_feature order(1..18,21..32): note = RNA
  modified_base 18: mod_base = OTHER; note = 2-Prime-O-Methoxyethyl modified 5-methyl Cytidine
  modified_base 19: mod_base = OTHER; note = DNA nucleotide carrying a 6-amino-5-nitro-3-yl-2(1H)-pyridone nucleobase
  modified_base 20: mod_base = OTHER; note = DNA nucleotide carrying a hypoxanthine nucleobase
  modified_base order(16..17,22,24,31..32): mod_base = OTHER; note = 2-Prime-Fluoro modified nucleoside
  modified_base order(1..15,21,23,25..30): mod_base = OTHER; note = 2-Prime-O-Methyl modified nucleoside
  modified_base order(1^2,31^32): mod_base = OTHER; note = (1,3-dimethylimidazolidin-2-ylidene) Phosphoramidate linkage
  modified_base order(2..20,21..31): mod_base = OTHER; note = Phosphorothioate linkage
  modified_base 20^21: mod_base = OTHER; note = Methylphosphonate linkage
  misc_feature 1..32: note = RM109204

SEQ ID NO: 430 - DNA, 32 bp, synthetic construct; identical to SEQ ID NO: 189
  source 1..32: mol_type = other DNA
  misc_feature 16..17: note = DNA
  misc_feature order(1..15,18..32): note = RNA
  modified_base 15: mod_base = OTHER; note = 2-Prime-O-Methoxyethyl modified 5-methyl Cytidine
  modified_base 16: mod_base = OTHER; note = DNA nucleotide carrying a 6-amino-5-nitro-3-yl-2(1H)-pyridone nucleobase
  modified_base 17: mod_base = OTHER; note = DNA nucleotide carrying a hypoxanthine nucleobase
  modified_base order(13..14,19,21,28..29): mod_base = OTHER; note = 2-Prime-Fluoro modified nucleoside
  modified_base order(1..12,18,20,22..27,30..32): mod_base = OTHER; note = 2-Prime-O-Methyl modified nucleoside
  modified_base order(1^2,31^32): mod_base = OTHER; note = (1,3-dimethylimidazolidin-2-ylidene) Phosphoramidate linkage
  modified_base order(2..17,18..31): mod_base = OTHER; note = Phosphorothioate linkage
  modified_base 17^18: mod_base = OTHER; note = Methylphosphonate linkage
  misc_feature 1..32: note = RM109205

SEQ ID NO: 431 - DNA, 32 bp, synthetic construct; identical to SEQ ID NO: 190
  source 1..32: mol_type = other DNA
  misc_feature 13..14: note = DNA
  misc_feature order(1..12,15..32): note = RNA
  modified_base 12: mod_base = OTHER; note = 2-Prime-O-Methoxyethyl modified 5-methyl Cytidine
  modified_base 13: mod_base = OTHER; note = DNA nucleotide carrying a 6-amino-5-nitro-3-yl-2(1H)-pyridone nucleobase
  modified_base 14: mod_base = OTHER; note = DNA nucleotide carrying a hypoxanthine nucleobase
  modified_base order(10..11,16,18,25..26): mod_base = OTHER; note = 2-Prime-Fluoro modified nucleoside
  modified_base order(1..9,15,17,19..24,27..32): mod_base = OTHER; note = 2-Prime-O-Methyl modified nucleoside
  modified_base order(1^2,31^32): mod_base = OTHER; note = (1,3-dimethylimidazolidin-2-ylidene) Phosphoramidate linkage
  modified_base order(2..14,15..31): mod_base = OTHER; note = Phosphorothioate linkage
  modified_base 14^15: mod_base = OTHER; note = Methylphosphonate linkage
  misc_feature 1..32: note = RM109206

SEQ ID NO: 432 - DNA, 32 bp, synthetic construct; identical to SEQ ID NO: 191
  source 1..32: mol_type = other DNA
  misc_feature 10..11: note = DNA
  misc_feature order(1..9,12..32): note = RNA
  modified_base 9: mod_base = OTHER; note = 2-Prime-O-Methoxyethyl modified 5-methyl Cytidine
  modified_base 10: mod_base = OTHER; note = DNA nucleotide carrying a 6-amino-5-nitro-3-yl-2(1H)-pyridone nucleobase
  modified_base 11: mod_base = OTHER; note = DNA nucleotide carrying a hypoxanthine nucleobase
  modified_base order(7..8,13,15,22..23): mod_base = OTHER; note = 2-Prime-Fluoro modified nucleoside
  modified_base order(1..6,12,14,16..21,24..32): mod_base = OTHER; note = 2-Prime-O-Methyl modified nucleoside
  modified_base order(1^2,31^32): mod_base = OTHER; note = (1,3-dimethylimidazolidin-2-ylidene) Phosphoramidate linkage
  modified_base order(2..11,12..31): mod_base = OTHER; note = Phosphorothioate linkage
  modified_base 11^12: mod_base = OTHER; note = Methylphosphonate linkage
  misc_feature 1..32: note = RM109207

SEQ ID NO: 433 - DNA, 32 bp, synthetic construct; identical to SEQ ID NO: 192
  source 1..32: mol_type = other DNA
  misc_feature 7..8: note = DNA
  misc_feature order(1..6,9..32): note = RNA
  modified_base 6: mod_base = OTHER; note = 2-Prime-O-Methoxyethyl modified 5-methyl Cytidine
  modified_base 7: mod_base = OTHER; note = DNA nucleotide carrying a 6-amino-5-nitro-3-yl-2(1H)-pyridone nucleobase
  modified_base 8: mod_base = OTHER; note = DNA nucleotide carrying a hypoxanthine nucleobase
  modified_base order(4..5,10,12,19..20): mod_base = OTHER; note = 2-Prime-Fluoro modified nucleoside
  modified_base order(1..3,9,11,13..18,21..32): mod_base = OTHER; note = 2-Prime-O-Methyl modified nucleoside
  modified_base order(1^2,31^32): mod_base = OTHER; note = (1,3-dimethylimidazolidin-2-ylidene) Phosphoramidate linkage
  modified_base order(2..8,9..31): mod_base = OTHER; note = Phosphorothioate linkage
  modified_base 8^9: mod_base = OTHER; note = Methylphosphonate linkage
  misc_feature 1..32: note = RM109208

SEQ ID NO: 434 - DNA, 32 bp, synthetic construct; identical to SEQ ID NO: 185
  source 1..32: mol_type = other DNA
  misc_feature 28..29: note = DNA
  misc_feature order(1..27,30..32): note = RNA
  modified_base 27: mod_base = OTHER; note = 2-Prime-O-Methoxyethyl modified 5-methyl Cytidine
  modified_base 28: mod_base = OTHER; note = DNA nucleotide carrying a 6-amino-5-nitro-3-yl-2(1H)-pyridone nucleobase
  modified_base 29: mod_base = OTHER; note = DNA nucleotide carrying a hypoxanthine nucleobase
  modified_base order(25,31..32): mod_base = OTHER; note = 2-Prime-Fluoro modified nucleoside
  modified_base order(1..24,26,30): mod_base = OTHER; note = 2-Prime-O-Methyl modified nucleoside
  modified_base order(1^2,31^32): mod_base = OTHER; note = (1,3-dimethylimidazolidin-2-ylidene) Phosphoramidate linkage
  modified_base order(2..29,30^31): mod_base = OTHER; note = Phosphorothioate linkage
  modified_base 29^30: mod_base = OTHER; note = Methylphosphonate linkage
  misc_feature 1..32: note = RM109209

SEQ ID NO: 435 - DNA, 32 bp, synthetic construct; identical to SEQ ID NO: 186
  source 1..32: mol_type = other DNA
  misc_feature 25..26: note = DNA
  misc_feature order(1..24,27..32): note = RNA
  modified_base 24: mod_base = OTHER; note = 2-Prime-O-Methoxyethyl modified 5-methyl Cytidine
  modified_base 25: mod_base = OTHER; note = DNA nucleotide carrying a 6-amino-5-nitro-3-yl-2(1H)-pyridone nucleobase
  modified_base 26: mod_base = OTHER; note = DNA nucleotide carrying a hypoxanthine nucleobase
  modified_base order(22,28..29): mod_base = OTHER; note = 2-Prime-Fluoro modified nucleoside
  modified_base order(1..21,23,27,30..32): mod_base = OTHER; note = 2-Prime-O-Methyl modified nucleoside
  modified_base order(1^2,31^32): mod_base = OTHER; note = (1,3-dimethylimidazolidin-2-ylidene) Phosphoramidate linkage
  modified_base order(2..26,27..31): mod_base = OTHER; note = Phosphorothioate linkage
  modified_base 26^27: mod_base = OTHER; note = Methylphosphonate linkage
  misc_feature 1..32: note = RM109210

SEQ ID NO: 436 - DNA, 32 bp, synthetic construct; identical to SEQ ID NO: 187
  source 1..32: mol_type = other DNA
  misc_feature 22..23: note = DNA
  misc_feature order(1..21,24..32): note = RNA
  modified_base 21: mod_base = OTHER; note = 2-Prime-O-Methoxyethyl modified 5-methyl Cytidine
  modified_base 22: mod_base = OTHER; note = DNA nucleotide carrying a 6-amino-5-nitro-3-yl-2(1H)-pyridone nucleobase
  modified_base 23: mod_base = OTHER; note = DNA nucleotide carrying a hypoxanthine nucleobase
  modified_base order(19,25..26): mod_base = OTHER; note = 2-Prime-Fluoro modified nucleoside
  modified_base order(1..18,20,24,27..32): mod_base = OTHER; note = 2-Prime-O-Methyl modified nucleoside
  modified_base order(1^2,31^32): mod_base = OTHER; note = (1,3-dimethylimidazolidin-2-ylidene) Phosphoramidate linkage
  modified_base order(2..23,24..31): mod_base = OTHER; note = Phosphorothioate linkage
  modified_base 23^24: mod_base = OTHER; note = Methylphosphonate linkage
  misc_feature 1..32: note = RM109211

SEQ ID NO: 437 - DNA, 32 bp, synthetic construct; identical to SEQ ID NO: 5
  source 1..32: mol_type = other DNA
  misc_feature 19..20: note = DNA
  misc_feature order(1..18,21..32): note = RNA
  modified_base 18: mod_base = OTHER; note = 2-Prime-O-Methoxyethyl modified 5-methyl Cytidine
  modified_base 19: mod_base = OTHER; note = DNA nucleotide carrying a 6-amino-5-nitro-3-yl-2(1H)-pyridone nucleobase
  modified_base 20: mod_base = OTHER; note = DNA nucleotide carrying a hypoxanthine nucleobase
  modified_base order(16,22..23): mod_base = OTHER; note = 2-Prime-Fluoro modified nucleoside
  modified_base order(1..15,17,21,24..32): mod_base = OTHER; note = 2-Prime-O-Methyl modified nucleoside
  modified_base order(1^2,31^32): mod_base = OTHER; note = (1,3-dimethylimidazolidin-2-ylidene) Phosphoramidate linkage
  modified_base order(2..20,21..31): mod_base = OTHER; note = Phosphorothioate linkage
  modified_base 20^21: mod_base = OTHER; note = Methylphosphonate linkage
  misc_feature 1..32: note = RM109212

SEQ ID NO: 438 - DNA, 32 bp, synthetic construct; identical to SEQ ID NO: 189
  source 1..32: mol_type = other DNA
  misc_feature 16..17: note = DNA
  misc_feature order(1..15,18..32): note = RNA
  modified_base 15: mod_base = OTHER; note = 2-Prime-O-Methoxyethyl modified 5-methyl Cytidine
  modified_base 16: mod_base = OTHER; note = DNA nucleotide carrying a 6-amino-5-nitro-3-yl-2(1H)-pyridone nucleobase
  modified_base 17: mod_base = OTHER; note = DNA nucleotide carrying a hypoxanthine nucleobase
  modified_base order(13,19..20): mod_base = OTHER; note = 2-Prime-Fluoro modified nucleoside
  modified_base order(1..12,14,18,21..32): mod_base = OTHER; note = 2-Prime-O-Methyl modified nucleoside
  modified_base order(1^2,31^32): mod_base = OTHER; note = (1,3-dimethylimidazolidin-2-ylidene) Phosphoramidate linkage
  modified_base order(2..17,18..31): mod_base = OTHER; note = Phosphorothioate linkage
  modified_base 17^18: mod_base = OTHER; note = Methylphosphonate linkage
  misc_feature 1..32: note = RM109213

SEQ ID NO: 439 - DNA, 32 bp, synthetic construct; identical to SEQ ID NO: 190
  source 1..32: mol_type = other DNA
  misc_feature 13..14: note = DNA
  misc_feature order(1..12,15..32): note = RNA
  modified_base 12: mod_base = OTHER; note = 2-Prime-O-Methoxyethyl modified 5-methyl Cytidine
  modified_base 13: mod_base = OTHER; note = DNA nucleotide carrying a 6-amino-5-nitro-3-yl-2(1H)-pyridone nucleobase
  modified_base 14: mod_base = OTHER; note = DNA nucleotide carrying a hypoxanthine nucleobase
  modified_base order(10,16..17): mod_base = OTHER; note = 2-Prime-Fluoro modified nucleoside
  modified_base order(1..9,11,15,18..32): mod_base = OTHER; note = 2-Prime-O-Methyl modified nucleoside
  modified_base order(1^2,31^32): mod_base = OTHER; note = (1,3-dimethylimidazolidin-2-ylidene) Phosphoramidate linkage
  modified_base order(2..14,15..31): mod_base = OTHER; note = Phosphorothioate linkage
  modified_base 14^15: mod_base = OTHER; note = Methylphosphonate linkage
  misc_feature 1..32: note = RM109214

SEQ ID NO: 440 - DNA, 32 bp, synthetic construct; identical to SEQ ID NO: 191
  source 1..32: mol_type = other DNA
  misc_feature 10..11: note = DNA
  misc_feature order(1..9,12..32): note = RNA
  modified_base 9: mod_base = OTHER; note = 2-Prime-O-Methoxyethyl modified 5-methyl Cytidine
  modified_base 10: mod_base = OTHER; note = DNA nucleotide carrying a 6-amino-5-nitro-3-yl-2(1H)-pyridone nucleobase
  modified_base 11: mod_base = OTHER; note = DNA nucleotide carrying a hypoxanthine nucleobase
  modified_base order(7,13..14): mod_base = OTHER; note = 2-Prime-Fluoro modified nucleoside
  modified_base order(1..6,8,12,15..32): mod_base = OTHER; note = 2-Prime-O-Methyl modified nucleoside
  modified_base order(1^2,31^32): mod_base = OTHER; note = (1,3-dimethylimidazolidin-2-ylidene) Phosphoramidate linkage
  modified_base order(2..11,12..31): mod_base = OTHER; note = Phosphorothioate linkage
  modified_base 11^12: mod_base = OTHER; note = Methylphosphonate linkage
  misc_feature 1..32: note = RM109215

SEQ ID NO: 441 - DNA, 32 bp, synthetic construct; identical to SEQ ID NO: 192
  source 1..32: mol_type = other DNA
  misc_feature 7..8: note = DNA
  misc_feature order(1..6,9..32): note = RNA
  modified_base 6: mod_base = OTHER; note = 2-Prime-O-Methoxyethyl modified 5-methyl Cytidine
  modified_base 7: mod_base = OTHER; note = DNA nucleotide carrying a 6-amino-5-nitro-3-yl-2(1H)-pyridone nucleobase
  modified_base 8: mod_base = OTHER; note = DNA nucleotide carrying a hypoxanthine nucleobase
  modified_base order(4,10..11): mod_base = OTHER; note = 2-Prime-Fluoro modified nucleoside
  modified_base order(1..3,5,9,12..32): mod_base = OTHER; note = 2-Prime-O-Methyl modified nucleoside
  modified_base order(1^2,31^32): mod_base = OTHER; note = (1,3-dimethylimidazolidin-2-ylidene) Phosphoramidate linkage
  modified_base order(2..8,9..31): mod_base = OTHER; note = Phosphorothioate linkage
  modified_base 8^9: mod_base = OTHER; note = Methylphosphonate linkage
  misc_feature 1..32: note = RM109216

SEQ ID NO: 442 - DNA, 32 bp, synthetic construct; identical to SEQ ID NO: 186
  source 1..32: mol_type = other DNA
  misc_feature 25..26: note = DNA
  misc_feature order(1..24,27..32): note = RNA
  modified_base 24: mod_base = OTHER; note = 2-Prime-O-Methoxyethyl modified 5-methyl Cytidine
  modified_base 25: mod_base = OTHER; note = DNA nucleotide carrying a 6-amino-5-nitro-3-yl-2(1H)-pyridone nucleobase
  modified_base 26: mod_base = OTHER; note = DNA nucleotide carrying a hypoxanthine nucleobase
  modified_base order(23,28,30): mod_base = OTHER; note = 2-Prime-Fluoro modified nucleoside
  modified_base order(1..22,27,29,31..32): mod_base = OTHER; note = 2-Prime-O-Methyl modified nucleoside
  modified_base order(1^2,31^32): mod_base = OTHER; note = (1,3-dimethylimidazolidin-2-ylidene) Phosphoramidate linkage
  modified_base order(2..26,27..31): mod_base = OTHER; note = Phosphorothioate linkage
  modified_base 26^27: mod_base = OTHER; note = Methylphosphonate linkage
  misc_feature 1..32: note = RM109217

SEQ ID NO: 443 - DNA, 32 bp, synthetic construct; identical to SEQ ID NO: 187
  source 1..32: mol_type = other DNA
  misc_feature 22..23: note = DNA
  misc_feature order(1..21,24..32): note = RNA
  modified_base 21: mod_base = OTHER; note = 2-Prime-O-Methoxyethyl modified 5-methyl Cytidine
  modified_base 22: mod_base = OTHER; note = DNA nucleotide carrying a 6-amino-5-nitro-3-yl-2(1H)-pyridone nucleobase
  modified_base 23: mod_base = OTHER; note = DNA nucleotide carrying a hypoxanthine nucleobase
  modified_base order(20,25,27): mod_base = OTHER; note = 2-Prime-Fluoro modified nucleoside
  modified_base order(1..19,24,26,28..32): mod_base = OTHER; note = 2-Prime-O-Methyl modified nucleoside
  modified_base order(1^2,31^32): mod_base = OTHER; note = (1,3-dimethylimidazolidin-2-ylidene) Phosphoramidate linkage
  modified_base order(2..23,24..31): mod_base = OTHER; note = Phosphorothioate linkage
  modified_base 23^24: mod_base = OTHER; note = Methylphosphonate linkage
  misc_feature 1..32: note = RM109218

SEQ ID NO: 444 - DNA, 32 bp, synthetic construct; identical to SEQ ID NO: 5
  source 1..32: mol_type = other DNA
  misc_feature 19..20: note = DNA
  misc_feature order(1..18,21..32): note = RNA
  modified_base 18: mod_base = OTHER; note = 2-Prime-O-Methoxyethyl modified 5-methyl Cytidine
  modified_base 19: mod_base = OTHER; note = DNA nucleotide carrying a 6-amino-5-nitro-3-yl-2(1H)-pyridone nucleobase
  modified_base 20: mod_base = OTHER; note = DNA nucleotide carrying a hypoxanthine nucleobase
  modified_base order(17,22,24): mod_base = OTHER; note = 2-Prime-Fluoro modified nucleoside
  modified_base order(1..16,21,23,25..32): mod_base = OTHER; note = 2-Prime-O-Methyl modified nucleoside
  modified_base order(1^2,31^32): mod_base = OTHER; note = (1,3-dimethylimidazolidin-2-ylidene) Phosphoramidate linkage
  modified_base order(2..20,21..31): mod_base = OTHER; note = Phosphorothioate linkage
  modified_base 20^21: mod_base = OTHER; note = Methylphosphonate linkage
  misc_feature 1..32: note = RM109219

SEQ ID NO: 445 - DNA, 32 bp, synthetic construct; identical to SEQ ID NO: 189
  source 1..32: mol_type = other DNA
  misc_feature 16..17: note = DNA
  misc_feature order(1..15,18..32): note = RNA
  modified_base 15: mod_base = OTHER; note = 2-Prime-O-Methoxyethyl modified 5-methyl Cytidine
  modified_base 16: mod_base = OTHER; note = DNA nucleotide carrying a 6-amino-5-nitro-3-yl-2(1H)-pyridone nucleobase
  modified_base 17: mod_base = OTHER; note = DNA nucleotide carrying a hypoxanthine nucleobase
  modified_base order(14,19,21): mod_base = OTHER; note = 2-Prime-Fluoro modified nucleoside
  modified_base order(1..13,18,20,22..32): mod_base = OTHER; note = 2-Prime-O-Methyl modified nucleoside
  modified_base order(1^2,31^32): mod_base = OTHER; note = (1,3-dimethylimidazolidin-2-ylidene) Phosphoramidate linkage
  modified_base order(2..17,18..31): mod_base = OTHER; note = Phosphorothioate linkage
  modified_base 17^18: mod_base = OTHER; note = Methylphosphonate linkage
  misc_feature 1..32: note = RM109220

SEQ ID NO: 446 - DNA, 32 bp, synthetic construct; identical to SEQ ID NO: 190
  source 1..32: mol_type = other DNA
  misc_feature 13..14: note = DNA
  misc_feature order(1..12,15..32): note = RNA
  modified_base 12: mod_base = OTHER; note = 2-Prime-O-Methoxyethyl modified 5-methyl Cytidine
  modified_base 13: mod_base = OTHER; note = DNA nucleotide carrying a 6-amino-5-nitro-3-yl-2(1H)-pyridone nucleobase
  modified_base 14: mod_base = OTHER; note = DNA nucleotide carrying a hypoxanthine nucleobase
  modified_base order(11,16,18): mod_base = OTHER; note = 2-Prime-Fluoro modified nucleoside
  modified_base order(1..10,15,17,19..32): mod_base = OTHER; note = 2-Prime-O-Methyl modified nucleoside
  modified_base order(1^2,31^32): mod_base = OTHER; note = (1,3-dimethylimidazolidin-2-ylidene) Phosphoramidate linkage
  modified_base order(2..14,15..31): mod_base = OTHER; note = Phosphorothioate linkage
  modified_base 14^15: mod_base = OTHER; note = Methylphosphonate linkage
  misc_feature 1..32: note = RM109221

SEQ ID NO: 447 - DNA, 32 bp, synthetic construct; identical to SEQ ID NO: 191
  source 1..32: mol_type = other DNA
  misc_feature 10..11: note = DNA
  misc_feature order(1..9,12..32): note = RNA
  modified_base 9: mod_base = OTHER; note = 2-Prime-O-Methoxyethyl modified 5-methyl Cytidine
  modified_base 10: mod_base = OTHER; note = DNA nucleotide carrying a 6-amino-5-nitro-3-yl-2(1H)-pyridone nucleobase
  modified_base 11: mod_base = OTHER; note = DNA nucleotide carrying a hypoxanthine nucleobase
  modified_base order(8,13,15): mod_base = OTHER; note = 2-Prime-Fluoro modified nucleoside
  modified_base order(1..7,12,14,16..32): mod_base = OTHER; note = 2-Prime-O-Methyl modified nucleoside
  modified_base order(1^2,31^32): mod_base = OTHER; note = (1,3-dimethylimidazolidin-2-ylidene) Phosphoramidate linkage
  modified_base order(2..11,12..31): mod_base = OTHER; note = Phosphorothioate linkage
  modified_base 11^12: mod_base = OTHER; note = Methylphosphonate linkage
  misc_feature 1..32: note = RM109222

SEQ ID NO: 448 - DNA, 32 bp, synthetic construct; identical to SEQ ID NO: 192
  source 1..32: mol_type = other DNA
  misc_feature 7..8: note = DNA
  misc_feature order(1..6,9..32): note = RNA
  modified_base 6: mod_base = OTHER; note = 2-Prime-O-Methoxyethyl modified 5-methyl Cytidine
  modified_base 7: mod_base = OTHER; note = DNA nucleotide carrying a 6-amino-5-nitro-3-yl-2(1H)-pyridone nucleobase
  modified_base 8: mod_base = OTHER; note = DNA nucleotide carrying a hypoxanthine nucleobase
  modified_base order(5,10,12): mod_base = OTHER; note = 2-Prime-Fluoro modified nucleoside
  modified_base order(1..4,9,11,13..32): mod_base = OTHER; note = 2-Prime-O-Methyl modified nucleoside
  modified_base order(1^2,31^32): mod_base = OTHER; note = (1,3-dimethylimidazolidin-2-ylidene) Phosphoramidate linkage
  modified_base order(2..8,9..31): mod_base = OTHER; note = Phosphorothioate linkage
  modified_base 8^9: mod_base = OTHER; note = Methylphosphonate linkage
  misc_feature 1..32: note = RM109223

SEQ ID NO: 449 - DNA, 32 bp, synthetic construct; identical to SEQ ID NO: 192
  source 1..32: mol_type = other DNA
  misc_feature 7..8: note = DNA
  misc_feature order(1..6,9..32): note = RNA
  modified_base 6: mod_base = OTHER; note = 2-Prime-O-Methoxyethyl modified 5-methyl Cytidine
  modified_base 7: mod_base = OTHER; note = DNA nucleotide carrying a 6-amino-5-nitro-3-yl-2(1H)-pyridone nucleobase
  modified_base 8: mod_base = OTHER; note = DNA nucleotide carrying a hypoxanthine nucleobase
  modified_base order(1,3,10,12,17..18,21,26,30): mod_base = OTHER; note = 2-Prime-Fluoro modified nucleoside
  modified_base order(2,4..5,9,11,13..16,19..20,22..25,27..29,31..32): mod_base = OTHER; note = 2-Prime-O-Methyl modified nucleoside
  modified_base order(1^2,31^32): mod_base = OTHER; note = (1,3-dimethylimidazolidin-2-ylidene) Phosphoramidate linkage
  modified_base order(2..8,9..31): mod_base = OTHER; note = Phosphorothioate linkage
  modified_base 8^9: mod_base = OTHER; note = Methylphosphonate linkage
  misc_feature 1..32: note = RM109224

SEQ ID NO: 450 - DNA, 32 bp, synthetic construct; identical to SEQ ID NO: 187
  source 1..32: mol_type = other DNA
  misc_feature 22..23: note = DNA
  misc_feature order(1..21,24..32): note = RNA
  modified_base 21: mod_base = OTHER; note = 2-Prime-O-Methoxyethyl modified 5-methyl Cytidine
  modified_base 22: mod_base = OTHER; note = DNA nucleotide carrying a 6-amino-5-nitro-3-yl-2(1H)-pyridone nucleobase
  modified_base 23: mod_base = OTHER; note = DNA nucleotide carrying a hypoxanthine nucleobase
  modified_base order(1,5,10,13..14,19,25,28,30): mod_base = OTHER; note = 2-Prime-Fluoro modified nucleoside
  modified_base order(2..4,6..9,11..12,15..18,20,24,26..27,29,31..32): mod_base = OTHER; note = 2-Prime-O-Methyl modified nucleoside
  modified_base order(1^2,31^32): mod_base = OTHER; note = (1,3-dimethylimidazolidin-2-ylidene) Phosphoramidate linkage
  modified_base order(2..23,24..31): mod_base = OTHER; note = Phosphorothioate linkage
  modified_base 23^24: mod_base = OTHER; note = Methylphosphonate linkage
  misc_feature 1..32: note = RM109225

SEQ ID NO: 451 - DNA, 23 bp, synthetic construct
  source 1..23: mol_type = other DNA
  misc_feature 12..13: note = DNA
  misc_feature order(1..11,14..23): note = RNA
  modified_base 11: mod_base = OTHER; note = 2-Prime-O-Methoxyethyl modified 5-methyl Cytidine
  modified_base 12: mod_base = OTHER; note = DNA nucleotide carrying a 6-amino-5-nitro-3-yl-2(1H)-pyridone nucleobase
  modified_base 13: mod_base = OTHER; note = DNA nucleotide carrying a hypoxanthine nucleobase
  modified_base order(6,8,15,17,22..23): mod_base = OTHER; note = 2-Prime-Fluoro modified nucleoside
  modified_base order(1..5,7,9..10,14,16,18..21): mod_base = OTHER; note = 2-Prime-O-Methyl modified nucleoside
  modified_base order(1^2,22^23): mod_base = OTHER; note = (1,3-dimethylimidazolidin-2-ylidene) Phosphoramidate linkage
  modified_base order(2..13,14..22): mod_base = OTHER; note = Phosphorothioate linkage
  modified_base 13^14: mod_base = OTHER; note = Methylphosphonate linkage
  misc_feature 1..23: note = RM109226
tgatgccatacnntgccaccagg

SEQ ID NO: 452 - DNA, 23 bp, synthetic construct
  source 1..23: mol_type = other DNA
  misc_feature 9..10: note = DNA
  misc_feature order(1..8,11..23): note = RNA
  modified_base 8: mod_base = OTHER; note = 2-Prime-O-Methoxyethyl modified 5-methyl Cytidine
  modified_base 9: mod_base = OTHER; note = DNA nucleotide carrying a 6-amino-5-nitro-3-yl-2(1H)-pyridone nucleobase
  modified_base 10: mod_base = OTHER; note = DNA nucleotide carrying a hypoxanthine nucleobase
  modified_base order(3,5,12,14,19..20): mod_base = OTHER; note = 2-Prime-Fluoro modified nucleoside
  modified_base order(1..2,4,6..7,11,13,15..18,21..23): mod_base = OTHER; note = 2-Prime-O-Methyl modified nucleoside
  modified_base order(1^2,22^23): mod_base = OTHER; note = (1,3-dimethylimidazolidin-2-ylidene) Phosphoramidate linkage
  modified_base order(2..10,11..22): mod_base = OTHER; note = Phosphorothioate linkage
  modified_base 10^11: mod_base = OTHER; note = Methylphosphonate linkage
  misc_feature 1..23: note = RM109227
tgccatacnntgccaccagggcg

SEQ ID NO: 453 - DNA, 32 bp, synthetic construct; identical to SEQ ID NO: 5
  source 1..32: mol_type = other DNA
  misc_feature 19..20: note = DNA
  misc_feature order(1..18,21..32): note = RNA
  modified_base 18: mod_base = OTHER; note = 2-Prime-O-Methoxyethyl modified 5-methyl Cytidine
  modified_base 19: mod_base = OTHER; note = DNA nucleotide carrying a 6-amino-5-nitro-3-yl-2(1H)-pyridone nucleobase
  modified_base 20: mod_base = OTHER; note = DNA nucleotide carrying a hypoxanthine nucleobase
  modified_base order(13,15,22,24,29..30): mod_base = OTHER; note = 2-Prime-Fluoro modified nucleoside
  modified_base order(1..12,14,16..17,21,23,25..28,31..32): mod_base = OTHER; note = 2-Prime-O-Methyl modified nucleoside
  modified_base order(1^2,31^32): mod_base = OTHER; note = (1,3-dimethylimidazolidin-2-ylidene) Phosphoramidate linkage
  modified_base order(2..20,21..31): mod_base = OTHER; note = Phosphorothioate linkage
  modified_base 20^21: mod_base = OTHER; note = Methylphosphonate linkage
  misc_feature 1..32: note = RM109228

SEQ ID NO: 454 - DNA, 32 bp, synthetic construct; identical to SEQ ID NO: 189
  source 1..32: mol_type = other DNA
  misc_feature 16..17: note = DNA
  misc_feature order(1..15,18..32): note = RNA
  modified_base 15: mod_base = OTHER; note = 2-Prime-O-Methoxyethyl modified 5-methyl Cytidine
  modified_base 16: mod_base = OTHER; note = DNA nucleotide carrying a 6-amino-5-nitro-3-yl-2(1H)-pyridone nucleobase
  modified_base 17: mod_base = OTHER; note = DNA nucleotide carrying a hypoxanthine nucleobase
  modified_base order(10,12,19,21,26..27): mod_base = OTHER; note = 2-Prime-Fluoro modified nucleoside
  modified_base order(1..9,11,13..14,18,20,22..25,28..32): mod_base = OTHER; note = 2-Prime-O-Methyl modified nucleoside
  modified_base order(1^2,31^32): mod_base = OTHER; note = (1,3-dimethylimidazolidin-2-ylidene) Phosphoramidate linkage
  modified_base order(2..17,18..31): mod_base = OTHER; note = Phosphorothioate linkage
  modified_base 17^18: mod_base = OTHER; note = Methylphosphonate linkage
  misc_feature 1..32: note = RM109229

SEQ ID NO: 455 - DNA, 32 bp, synthetic construct; identical to SEQ ID NO: 190
  source 1..32: mol_type = other DNA
  misc_feature 13..14: note = DNA
  misc_feature order(1..12,15..32): note = RNA
  modified_base 12: mod_base = OTHER; note = 2-Prime-O-Methoxyethyl modified 5-methyl Cytidine
  modified_base 13: mod_base = OTHER; note = DNA nucleotide carrying a 6-amino-5-nitro-3-yl-2(1H)-pyridone nucleobase
  modified_base 14: mod_base = OTHER; note = DNA nucleotide carrying a hypoxanthine nucleobase
  modified_base order(7,9,16,18,23..24): mod_base = OTHER; note = 2-Prime-Fluoro modified nucleoside
  modified_base order(1..6,8,10..11,15,17,19..22,25..32): mod_base = OTHER; note = 2-Prime-O-Methyl modified nucleoside
  modified_base order(1^2,31^32): mod_base = OTHER; note = (1,3-dimethylimidazolidin-2-ylidene) Phosphoramidate linkage
  modified_base order(2..14,15..31): mod_base = OTHER; note = Phosphorothioate linkage
  modified_base 14^15: mod_base = OTHER; note = Methylphosphonate linkage
  misc_feature 1..32: note = RM109230

SEQ ID NO: 456 - DNA, 32 bp, synthetic construct; identical to SEQ ID NO: 191
  source 1..32: mol_type = other DNA
  misc_feature 10..11: note = DNA
  misc_feature order(1..9,12..32): note = RNA
  modified_base 9: mod_base = OTHER; note = 2-Prime-O-Methoxyethyl modified 5-methyl Cytidine
  modified_base 10: mod_base = OTHER; note = DNA nucleotide carrying a 6-amino-5-nitro-3-yl-2(1H)-pyridone nucleobase
  modified_base 11: mod_base = OTHER; note = DNA nucleotide carrying a hypoxanthine nucleobase
  modified_base order(4,6,13,15,20..21): mod_base = OTHER; note = 2-Prime-Fluoro modified nucleoside
  modified_base order(1..3,5,7..8,12,14,16..19,22..32): mod_base = OTHER; note = 2-Prime-O-Methyl modified nucleoside
  modified_base order(1^2,31^32): mod_base = OTHER; note = (1,3-dimethylimidazolidin-2-ylidene) Phosphoramidate linkage
  modified_base order(2..11,12..31): mod_base = OTHER; note = Phosphorothioate linkage
  modified_base 11^12: mod_base = OTHER; note = Methylphosphonate linkage
  misc_feature 1..32: note = RM109231

SEQ ID NO: 457 - DNA, 32 bp, synthetic construct; identical to SEQ ID NO: 192
  source 1..32: mol_type = other DNA
  misc_feature 7..8: note = DNA
  misc_feature order(1..6,9..32): note = RNA
  modified_base 6: mod_base = OTHER; note = 2-Prime-O-Methoxyethyl modified 5-methyl Cytidine
  modified_base 7: mod_base = OTHER; note = DNA nucleotide carrying a 6-amino-5-nitro-3-yl-2(1H)-pyridone nucleobase
  modified_base 8: mod_base = OTHER; note = DNA nucleotide carrying a hypoxanthine nucleobase
  modified_base order(1,3,10,12,17..18): mod_base = OTHER; note = 2-Prime-Fluoro modified nucleoside
  modified_base order(2,4..5,9,11,13..16,19..32): mod_base = OTHER; note = 2-Prime-O-Methyl modified nucleoside
  modified_base order(1^2,31^32): mod_base = OTHER; note = (1,3-dimethylimidazolidin-2-ylidene) Phosphoramidate linkage
  modified_base order(2..8,9..31): mod_base = OTHER; note = Phosphorothioate linkage
  modified_base 8^9: mod_base = OTHER; note = Methylphosphonate linkage
  misc_feature 1..32: note = RM109232

SEQ ID NO: 458 - DNA, 23 bp, synthetic construct
  source 1..23: mol_type = other DNA
  misc_feature 15..16: note = DNA
  misc_feature order(1..14,17..23): note = RNA
  modified_base 14: mod_base = OTHER; note = 2-Prime-O-Methoxyethyl modified 5-methyl Cytidine
  modified_base 15: mod_base = OTHER; note = DNA nucleotide carrying a 6-amino-5-nitro-3-yl-2(1H)-pyridone nucleobase
  modified_base 16: mod_base = OTHER; note = DNA nucleotide carrying a hypoxanthine nucleobase
  modified_base order(6..7,12,18,21,23): mod_base = OTHER; note = 2-Prime-Fluoro modified nucleoside
  modified_base order(1..5,8..11,13,17,19..20,22): mod_base = OTHER; note = 2-Prime-O-Methyl modified nucleoside
  modified_base order(1^2,22^23): mod_base = OTHER; note = (1,3-dimethylimidazolidin-2-ylidene) Phosphoramidate linkage
  modified_base order(2..16,17..22): mod_base = OTHER; note = Phosphorothioate linkage
  modified_base 16^17: mod_base = OTHER; note = Methylphosphonate linkage
  misc_feature 1..23: note = RM109233
gcatgatgccatacnntgccacc

SEQ ID NO: 459 - DNA, 23 bp, synthetic construct
  source 1..23: mol_type = other DNA
  misc_feature 12..13: note = DNA
  misc_feature order(1..11,14..23): note = RNA
  modified_base 11: mod_base = OTHER; note = 2-Prime-O-Methoxyethyl modified 5-methyl Cytidine
  modified_base 12: mod_base = OTHER; note = DNA nucleotide carrying a 6-amino-5-nitro-3-yl-2(1H)-pyridone nucleobase
  modified_base 13: mod_base = OTHER; note = DNA nucleotide carrying a hypoxanthine nucleobase
  modified_base order(3..4,9,15,18,20): mod_base = OTHER; note = 2-Prime-Fluoro modified nucleoside
  modified_base order(1..2,5..8,10,14,16..17,19,21..23): mod_base = OTHER; note = 2-Prime-O-Methyl modified nucleoside
  modified_base order(1^2,22^23): mod_base = OTHER; note = (1,3-dimethylimidazolidin-2-ylidene) Phosphoramidate linkage
  modified_base order(2..13,14..22): mod_base = OTHER; note = Phosphorothioate linkage
  modified_base 13^14: mod_base = OTHER; note = Methylphosphonate linkage
  misc_feature 1..23: note = RM109234
tgatgccatacnntgccaccagg

SEQ ID NO: 460 - DNA, 32 bp, synthetic construct; identical to SEQ ID NO: 187
  source 1..32: mol_type = other DNA
  misc_feature 22..23: note = DNA
  misc_feature order(1..21,24..32): note = RNA
  modified_base 21: mod_base = OTHER; note = 2-Prime-O-Methoxyethyl modified 5-methyl Cytidine
  modified_base 22: mod_base = OTHER; note = DNA nucleotide carrying a 6-amino-5-nitro-3-yl-2(1H)-pyridone nucleobase
  modified_base 23: mod_base = OTHER; note = DNA nucleotide carrying a hypoxanthine nucleobase
  modified_base order(13..14,19,25,28,30): mod_base = OTHER; note = 2-Prime-Fluoro modified nucleoside
  modified_base order(1..12,15..18,20,24,26..27,29,31..32): mod_base = OTHER; note = 2-Prime-O-Methyl modified nucleoside
  modified_base order(1^2,31^32): mod_base = OTHER; note = (1,3-dimethylimidazolidin-2-ylidene) Phosphoramidate linkage
  modified_base order(2..23,24..31): mod_base = OTHER; note = Phosphorothioate linkage
  modified_base 23^24: mod_base = OTHER; note = Methylphosphonate linkage
  misc_feature 1..32: note = RM109235

SEQ ID NO: 461 - DNA, 32 bp, synthetic construct; identical to SEQ ID NO: 5
  source 1..32: mol_type = other DNA
  misc_feature 19..20: note = DNA
  misc_feature order(1..18,21..32): note = RNA
  modified_base 18: mod_base = OTHER; note = 2-Prime-O-Methoxyethyl modified 5-methyl Cytidine
  modified_base 19: mod_base = OTHER; note = DNA nucleotide carrying a 6-amino-5-nitro-3-yl-2(1H)-pyridone nucleobase
  modified_base 20: mod_base = OTHER; note = DNA nucleotide carrying a hypoxanthine nucleobase
  modified_base order(10..11,16,22,25,27): mod_base = OTHER; note = 2-Prime-Fluoro modified nucleoside
  modified_base order(1..9,12..15,17,21,23..24,26,28..32): mod_base = OTHER; note = 2-Prime-O-Methyl modified nucleoside
  modified_base order(1^2,31^32): mod_base = OTHER; note = (1,3-dimethylimidazolidin-2-ylidene) Phosphoramidate linkage
  modified_base order(2..20,21..31): mod_base = OTHER; note = Phosphorothioate linkage
  modified_base 20^21: mod_base = OTHER; note = Methylphosphonate linkage
  misc_feature 1..32: note = RM109236

SEQ ID NO: 462 - DNA, 32 bp, synthetic construct; identical to SEQ ID NO: 189
  source 1..32: mol_type = other DNA
  misc_feature 16..17: note = DNA
  misc_feature order(1..15,18..32): note = RNA
  modified_base 15: mod_base = OTHER; note = 2-Prime-O-Methoxyethyl modified 5-methyl Cytidine
  modified_base 16: mod_base = OTHER; note = DNA nucleotide carrying a 6-amino-5-nitro-3-yl-2(1H)-pyridone nucleobase
  modified_base 17: mod_base = OTHER; note = DNA nucleotide carrying a hypoxanthine nucleobase
  modified_base order(7..8,13,19,22,24): mod_base = OTHER; note = 2-Prime-Fluoro modified nucleoside
  modified_base order(1..6,9..12,14,18,20..21,23,25..32): mod_base = OTHER; note = 2-Prime-O-Methyl modified nucleoside
  modified_base order(1^2,31^32): mod_base = OTHER; note = (1,3-dimethylimidazolidin-2-ylidene) Phosphoramidate linkage
  modified_base order(2..17,18..31): mod_base = OTHER; note = Phosphorothioate linkage
  modified_base 17^18: mod_base = OTHER; note = Methylphosphonate linkage
  misc_feature 1..32: note = RM109237

SEQ ID NO: 463 - DNA, 32 bp, synthetic construct; identical to SEQ ID NO: 190
  source 1..32: mol_type = other DNA
  misc_feature 13..14: note = DNA
  misc_feature order(1..12,15..32): note = RNA
  modified_base 12: mod_base = OTHER; note = 2-Prime-O-Methoxyethyl modified 5-methyl Cytidine
  modified_base 13: mod_base = OTHER; note = DNA nucleotide carrying a 6-amino-5-nitro-3-yl-2(1H)-pyridone nucleobase
  modified_base 14: mod_base = OTHER; note = DNA nucleotide carrying a hypoxanthine nucleobase
  modified_base order(4..5,10,16,19,21): mod_base = OTHER; note = 2-Prime-Fluoro modified nucleoside
  modified_base order(1..3,6..9,11,15,17..18,20,22..32): mod_base = OTHER; note = 2-Prime-O-Methyl modified nucleoside
  modified_base order(1^2,31^32): mod_base = OTHER; note = (1,3-dimethylimidazolidin-2-ylidene) Phosphoramidate linkage
  modified_base order(2..14,15..31): mod_base = OTHER; note = Phosphorothioate linkage
  modified_base 14^15: mod_base = OTHER; note = Methylphosphonate linkage
  misc_feature 1..32: note = RM109238

SEQ ID NO: 464 - DNA, 32 bp, synthetic construct; identical to SEQ ID NO: 191
  source 1..32: mol_type = other DNA
  misc_feature 10..11: note = DNA
  misc_feature order(1..9,12..32): note = RNA
  modified_base 9: mod_base = OTHER; note = 2-Prime-O-Methoxyethyl modified 5-methyl Cytidine
  modified_base 10: mod_base = OTHER; note = DNA nucleotide carrying a 6-amino-5-nitro-3-yl-2(1H)-pyridone nucleobase
  modified_base 11: mod_base = OTHER; note = DNA nucleotide carrying a hypoxanthine nucleobase
  modified_base order(1..2,7,13,16,18): mod_base = OTHER; note = 2-Prime-Fluoro modified nucleoside
  modified_base order(3..6,8,12,14..15,17,19..32): mod_base = OTHER; note = 2-Prime-O-Methyl modified nucleoside
  modified_base order(1^2,31^32): mod_base = OTHER; note = (1,3-dimethylimidazolidin-2-ylidene) Phosphoramidate linkage
  modified_base order(2..11,12..31): mod_base = OTHER; note = Phosphorothioate linkage
  modified_base 11^12: mod_base = OTHER; note = Methylphosphonate linkage
  misc_feature 1..32: note = RM109239

SEQ ID NO: 465 - DNA, 32 bp, synthetic construct; identical to SEQ ID NO: 185
  source 1..32: mol_type = other DNA
  misc_feature 28..29: note = DNA
  misc_feature order(1..27,30..32): note = RNA
  modified_base 27: mod_base = OTHER; note = 2-Prime-O-Methoxyethyl modified 5-methyl Cytidine
  modified_base 28: mod_base = OTHER; note = DNA nucleotide carrying a 6-amino-5-nitro-3-yl-2(1H)-pyridone nucleobase
  modified_base 29: mod_base = OTHER; note = DNA nucleotide carrying a hypoxanthine nucleobase
  modified_base order(22,24,31): mod_base = OTHER; note = 2-Prime-Fluoro modified nucleoside
  modified_base order(1..21,23,25..26,30,32): mod_base = OTHER; note = 2-Prime-O-Methyl modified nucleoside
  modified_base order(1^2,31^32): mod_base = OTHER; note = (1,3-dimethylimidazolidin-2-ylidene) Phosphoramidate linkage
  modified_base order(2..29,30^31): mod_base = OTHER; note = Phosphorothioate linkage
  modified_base 29^30: mod_base = OTHER; note = Methylphosphonate linkage
  misc_feature 1..32: note = RM109240

SEQ ID NO: 466 - DNA, 32 bp, synthetic construct; identical to SEQ ID NO: 186
  source 1..32: mol_type = other DNA
  misc_feature 25..26: note = DNA
  misc_feature order(1..24,27..32): note = RNA
  modified_base 24: mod_base = OTHER; note = 2-Prime-O-Methoxyethyl modified 5-methyl Cytidine
  modified_base 25: mod_base = OTHER; note = DNA nucleotide carrying a 6-amino-5-nitro-3-yl-2(1H)-pyridone nucleobase
  modified_base 26: mod_base = OTHER; note = DNA nucleotide carrying a hypoxanthine nucleobase
  modified_base order(19,21,28): mod_base = OTHER; note = 2-Prime-Fluoro modified nucleoside
  modified_base order(1..18,20,22..23,27,29..32): mod_base = OTHER; note = 2-Prime-O-Methyl modified nucleoside
  modified_base order(1^2,31^32): mod_base = OTHER; note = (1,3-dimethylimidazolidin-2-ylidene) Phosphoramidate linkage
  modified_base order(2..26,27..31): mod_base = OTHER; note = Phosphorothioate linkage
  modified_base 26^27: mod_base = OTHER; note = Methylphosphonate linkage
  misc_feature 1..32: note = RM109241

SEQ ID NO: 467 - DNA, 32 bp, synthetic construct; identical to SEQ ID NO: 187
  source 1..32: mol_type = other DNA
  misc_feature 22..23: note = DNA
  misc_feature order(1..21,24..32): note = RNA
  modified_base 21: mod_base = OTHER; note = 2-Prime-O-Methoxyethyl modified 5-methyl Cytidine
  modified_base 22: mod_base = OTHER; note = DNA nucleotide carrying a 6-amino-5-nitro-3-yl-2(1H)-pyridone nucleobase
  modified_base 23: mod_base = OTHER; note = DNA nucleotide carrying a hypoxanthine nucleobase
  modified_base order(16,18,25): mod_base = OTHER; note = 2-Prime-Fluoro modified nucleoside
  modified_base order(1..15,17,19..20,24,26..32): mod_base = OTHER; note = 2-Prime-O-Methyl modified nucleoside
  modified_base order(1^2,31^32): mod_base = OTHER; note = (1,3-dimethylimidazolidin-2-ylidene) Phosphoramidate linkage
  modified_base order(2..23,24..31): mod_base = OTHER; note = Phosphorothioate linkage
  modified_base 23^24: mod_base = OTHER; note = Methylphosphonate linkage
  misc_feature 1..32: note = RM109242

SEQ ID NO: 468 - DNA, 32 bp, synthetic construct; identical to SEQ ID NO: 5
  source 1..32: mol_type = other DNA
  misc_feature 19..20: note = DNA
  misc_feature order(1..18,21..32): note = RNA
  modified_base 18: mod_base = OTHER; note = 2-Prime-O-Methoxyethyl modified 5-methyl Cytidine
  modified_base 19: mod_base = OTHER; note = DNA nucleotide carrying a 6-amino-5-nitro-3-yl-2(1H)-pyridone nucleobase
  modified_base 20: mod_base = OTHER; note = DNA nucleotide carrying a hypoxanthine nucleobase
  modified_base order(13,15,22): mod_base = OTHER; note = 2-Prime-Fluoro modified nucleoside
  modified_base order(1..12,14,16..17,21,23..32): mod_base = OTHER; note = 2-Prime-O-Methyl modified nucleoside
  modified_base order(1^2,31^32): mod_base = OTHER; note = (1,3-dimethylimidazolidin-2-ylidene) Phosphoramidate linkage
  modified_base order(2..20,21..31): mod_base = OTHER; note = Phosphorothioate linkage
  modified_base 20^21: mod_base = OTHER; note = Methylphosphonate linkage
  misc_feature 1..32: note = RM109243

SEQ ID NO: 469 - DNA, 32 bp, synthetic construct; identical to SEQ ID NO: 189
  source 1..32: mol_type = other DNA
  misc_feature 16..17: note = DNA
  misc_feature order(1..15,18..32): note = RNA
  modified_base 15: mod_base = OTHER; note = 2-Prime-O-Methoxyethyl modified 5-methyl Cytidine
  modified_base 16: mod_base = OTHER; note = DNA nucleotide carrying a 6-amino-5-nitro-3-yl-2(1H)-pyridone nucleobase
  modified_base 17: mod_base = OTHER; note = DNA nucleotide carrying a hypoxanthine nucleobase
  modified_base order(10,12,19): mod_base = OTHER; note = 2-Prime-Fluoro modified nucleoside
  modified_base order(1..9,11,13..14,18,20..32): mod_base = OTHER; note = 2-Prime-O-Methyl modified nucleoside
  modified_base order(1^2,31^32): mod_base = OTHER; note = (1,3-dimethylimidazolidin-2-ylidene) Phosphoramidate linkage
  modified_base order(2..17,18..31): mod_base = OTHER; note = Phosphorothioate linkage
  modified_base 17^18: mod_base = OTHER; note = Methylphosphonate linkage
  misc_feature 1..32: note = RM109244

SEQ ID NO: 470 - DNA, 32 bp, synthetic construct; identical to SEQ ID NO: 190
  source 1..32: mol_type = other DNA
  misc_feature 13..14: note = DNA
  misc_feature order(1..12,15..32): note = RNA
  modified_base 12: mod_base = OTHER; note = 2-Prime-O-Methoxyethyl modified 5-methyl Cytidine
  modified_base 13: mod_base = OTHER; note = DNA nucleotide carrying a 6-amino-5-nitro-3-yl-2(1H)-pyridone nucleobase
  modified_base 14: mod_base = OTHER; note = DNA nucleotide carrying a hypoxanthine nucleobase
  modified_base order(7,9,16): mod_base = OTHER; note = 2-Prime-Fluoro modified nucleoside
  modified_base order(1..6,8,10..11,15,17..32): mod_base = OTHER; note = 2-Prime-O-Methyl modified nucleoside
  modified_base order(1^2,31^32): mod_base = OTHER; note = (1,3-dimethylimidazolidin-2-ylidene) Phosphoramidate linkage
  modified_base order(2..14,15..31): mod_base = OTHER; note = Phosphorothioate linkage
  modified_base 14^15: mod_base = OTHER; note = Methylphosphonate linkage
  misc_feature 1..32: note = RM109245

SEQ ID NO: 471 - DNA, 32 bp, synthetic construct; identical to SEQ ID NO: 191
  source 1..32: mol_type = other DNA
  misc_feature 10..11: note = DNA
  misc_feature order(1..9,12..32): note = RNA
  modified_base 9: mod_base = OTHER; note = 2-Prime-O-Methoxyethyl modified 5-methyl Cytidine
  modified_base 10: mod_base = OTHER; note = DNA nucleotide carrying a 6-amino-5-nitro-3-yl-2(1H)-pyridone nucleobase
  modified_base 11: mod_base = OTHER; note = DNA nucleotide carrying a hypoxanthine nucleobase
  modified_base order(4,6,13): mod_base = OTHER; note = 2-Prime-Fluoro modified nucleoside
  modified_base order(1..3,5,7..8,12,14..32): mod_base = OTHER; note = 2-Prime-O-Methyl modified nucleoside
  modified_base order(1^2,31^32): mod_base = OTHER; note = (1,3-dimethylimidazolidin-2-ylidene) Phosphoramidate linkage
  modified_base order(2..11,12..31): mod_base = OTHER; note = Phosphorothioate linkage
  modified_base 11^12: mod_base = OTHER; note = Methylphosphonate linkage
  misc_feature 1..32: note = RM109246

SEQ ID NO: 472 - DNA, 32 bp, synthetic construct; identical to SEQ ID NO: 192
  source 1..32: mol_type = other DNA
  misc_feature 7..8: note = DNA
  misc_feature order(1..6,9..32): note = RNA
  modified_base 6: mod_base = OTHER; note = 2-Prime-O-Methoxyethyl modified 5-methyl Cytidine
  modified_base 7: mod_base = OTHER; note = DNA nucleotide carrying a 6-amino-5-nitro-3-yl-2(1H)-pyridone nucleobase
  modified_base 8: mod_base = OTHER; note = DNA nucleotide carrying a hypoxanthine nucleobase
  modified_base order(1,3,10): mod_base = OTHER; note = 2-Prime-Fluoro modified nucleoside
  modified_base order(2,4..5,9,11..32): mod_base = OTHER; note = 2-Prime-O-Methyl modified nucleoside
  modified_base order(1^2,31^32): mod_base = OTHER; note = (1,3-dimethylimidazolidin-2-ylidene) Phosphoramidate linkage
  modified_base order(2..8,9..31): mod_base = OTHER; note = Phosphorothioate linkage
  modified_base 8^9: mod_base = OTHER; note = Methylphosphonate linkage
  misc_feature 1..32: note = RM109247

SEQ ID NO: 473 - DNA, 32 bp, synthetic construct; identical to SEQ ID NO: 5
  source 1..32: mol_type = other DNA
  misc_feature 19..20: note = DNA
  misc_feature order(1..18,21..32): note = RNA
  modified_base 18: mod_base = OTHER; note = 2-Prime-O-Methoxyethyl modified 5-methyl Cytidine
  modified_base 19: mod_base = OTHER; note = DNA nucleotide carrying a 6-amino-5-nitro-3-yl-2(1H)-pyridone nucleobase
  modified_base 20: mod_base = OTHER; note = DNA nucleotide carrying a hypoxanthine nucleobase
  modified_base order(1,3,7,9..10,22,29..31): mod_base = OTHER; note = 2-Prime-Fluoro modified nucleoside
  modified_base order(2,4..6,8,11..17,21,23..28,32): mod_base = OTHER; note = 2-Prime-O-Methyl modified nucleoside
  modified_base order(1^2,31^32): mod_base = OTHER; note = (1,3-dimethylimidazolidin-2-ylidene) Phosphoramidate linkage
  modified_base order(2..20,21..31): mod_base = OTHER; note = Phosphorothioate linkage
  modified_base 20^21: mod_base = OTHER; note = Methylphosphonate linkage
  misc_feature 1..32: note = RM109248

SEQ ID NO: 474 - DNA, 32 bp, synthetic construct; identical to SEQ ID NO: 185
  source 1..32: mol_type = other DNA
  misc_feature 28..29: note = DNA
  misc_feature order(1..27,30..32): note = RNA
  modified_base 27: mod_base = OTHER; note = 2-Prime-O-Methoxyethyl modified 5-methyl Cytidine
  modified_base 28: mod_base = OTHER; note = DNA nucleotide carrying a 6-amino-5-nitro-3-yl-2(1H)-pyridone nucleobase
  modified_base 29: mod_base = OTHER; note = DNA nucleotide carrying a hypoxanthine nucleobase
  modified_base order(10,12,16,18..19,31): mod_base = OTHER; note = 2-Prime-Fluoro modified nucleoside
  modified_base order(1..9,11,13..15,17,20..26,30,32): mod_base = OTHER; note = 2-Prime-O-Methyl modified nucleoside
  modified_base order(1^2,31^32): mod_base = OTHER; note = (1,3-dimethylimidazolidin-2-ylidene) Phosphoramidate linkage
  modified_base order(2..29,30^31): mod_base = OTHER; note = Phosphorothioate linkage
  modified_base 29^30: mod_base = OTHER; note = Methylphosphonate linkage
  misc_feature 1..32: note = RM109249

SEQ ID NO: 475 - DNA, 32 bp, synthetic construct; identical to SEQ ID NO: 186
  source 1..32: mol_type = other DNA
  misc_feature 25..26: note = DNA
  misc_feature order(1..24,27..32): note = RNA
  modified_base 24: mod_base = OTHER; note = 2-Prime-O-Methoxyethyl modified 5-methyl Cytidine
  modified_base 25: mod_base = OTHER; note = DNA nucleotide carrying a 6-amino-5-nitro-3-yl-2(1H)-pyridone nucleobase
  modified_base 26: mod_base = OTHER; note = DNA nucleotide carrying a hypoxanthine nucleobase
  modified_base order(7,9,13,15..16,28): mod_base = OTHER; note = 2-Prime-Fluoro modified nucleoside
  modified_base order(1..6,8,10..12,14,17..23,27,29..32): mod_base = OTHER; note = 2-Prime-O-Methyl modified nucleoside
  modified_base order(1^2,31^32): mod_base = OTHER; note = (1,3-dimethylimidazolidin-2-ylidene) Phosphoramidate linkage
  modified_base order(2..26,27..31): mod_base = OTHER; note = Phosphorothioate linkage
  modified_base 26^27: mod_base = OTHER; note = Methylphosphonate linkage
  misc_feature 1..32: note = RM109250

SEQ ID NO: 476 - DNA, 32 bp, synthetic construct; identical to SEQ ID NO: 187
  source 1..32: mol_type = other DNA
  misc_feature 22..23: note = DNA
  misc_feature order(1..21,24..32): note = RNA
  modified_base 21: mod_base = OTHER; note = 2-Prime-O-Methoxyethyl modified 5-methyl Cytidine
  modified_base 22: mod_base = OTHER; note = DNA nucleotide carrying a 6-amino-5-nitro-3-yl-2(1H)-pyridone nucleobase
  modified_base 23: mod_base = OTHER; note = DNA nucleotide carrying a hypoxanthine nucleobase
  modified_base order(4,6,10,12..13,25): mod_base = OTHER; note = 2-Prime-Fluoro modified nucleoside
  modified_base order(1..3,5,7..9,11,14..20,24,26..32): mod_base = OTHER; note = 2-Prime-O-Methyl modified nucleoside
  modified_base order(1^2,31^32): mod_base = OTHER; note = (1,3-dimethylimidazolidin-2-ylidene) Phosphoramidate linkage
  modified_base order(2..23,24..31): mod_base = OTHER; note = Phosphorothioate linkage
  modified_base 23^24: mod_base = OTHER; note = Methylphosphonate linkage
  misc_feature 1..32: note = RM109251

SEQ ID NO: 477 - DNA, 32 bp, synthetic construct; identical to SEQ ID NO: 5
  source 1..32: mol_type = other DNA
  misc_feature 19..20: note = DNA
  misc_feature order(1..18,21..32): note = RNA
  modified_base 18: mod_base = OTHER; note = 2-Prime-O-Methoxyethyl modified 5-methyl Cytidine
  modified_base 19: mod_base = OTHER; note = DNA nucleotide carrying a 6-amino-5-nitro-3-yl-2(1H)-pyridone nucleobase
  modified_base 20: mod_base = OTHER; note = DNA nucleotide carrying a hypoxanthine nucleobase
  modified_base order(1,3,7,9..10,22): mod_base = OTHER; note = 2-Prime-Fluoro modified nucleoside
  modified_base order(2,4..6,8,11..17,21,23..32): mod_base = OTHER; note = 2-Prime-O-Methyl modified nucleoside
  modified_base order(1^2,31^32): mod_base = OTHER; note = (1,3-dimethylimidazolidin-2-ylidene) Phosphoramidate linkage
  modified_base order(2..20,21..31): mod_base = OTHER; note = Phosphorothioate linkage
  modified_base 20^21: mod_base = OTHER; note = Methylphosphonate linkage
  misc_feature 1..32: note = RM109252

SEQ ID NO: 478 - DNA, 32 bp, synthetic construct; identical to SEQ ID NO: 185
  source 1..32: mol_type = other DNA
  misc_feature 28..29: note = DNA
  misc_feature order(1..27,30..32): note = RNA
  modified_base 27: mod_base = OTHER; note = 2-Prime-O-Methoxyethyl modified 5-methyl Cytidine
  modified_base 28: mod_base = OTHER; note = DNA nucleotide carrying a 6-amino-5-nitro-3-yl-2(1H)-pyridone nucleobase
  modified_base 29: mod_base = OTHER; note = DNA nucleotide carrying a hypoxanthine nucleobase
  modified_base order(18..19,31): mod_base = OTHER; note = 2-Prime-Fluoro modified nucleoside
  modified_base order(1..17,20..26,30,32): mod_base = OTHER; note = 2-Prime-O-Methyl modified nucleoside
  modified_base order(1^2,31^32): mod_base = OTHER; note = (1,3-dimethylimidazolidin-2-ylidene) Phosphoramidate linkage
  modified_base order(2..29,30^31): mod_base = OTHER; note = Phosphorothioate linkage
  modified_base 29^30: mod_base = OTHER; note = Methylphosphonate linkage
  misc_feature 1..32: note = RM109253

SEQ ID NO: 479 - DNA, 32 bp, synthetic construct; identical to SEQ ID NO: 186
  source 1..32: mol_type = other DNA
  misc_feature 25..26: note = DNA
  misc_feature order(1..24,27..32): note = RNA
  modified_base 24: mod_base = OTHER; note = 2-Prime-O-Methoxyethyl modified 5-methyl Cytidine
  modified_base 25: mod_base = OTHER; note = DNA nucleotide carrying a 6-amino-5-nitro-3-yl-2(1H)-pyridone nucleobase
  modified_base 26: mod_base = OTHER; note = DNA nucleotide carrying a hypoxanthine nucleobase
  modified_base order(15..16,28): mod_base = OTHER; note = 2-Prime-Fluoro modified nucleoside
  modified_base order(1..14,17..23,27,29..32): mod_base = OTHER; note = 2-Prime-O-Methyl modified nucleoside
  modified_base order(1^2,31^32): mod_base = OTHER; note = (1,3-dimethylimidazolidin-2-ylidene) Phosphoramidate linkage
  modified_base order(2..26,27..31): mod_base = OTHER; note = Phosphorothioate linkage
  modified_base 26^27: mod_base = OTHER; note = Methylphosphonate linkage
  misc_feature 1..32: note = RM109254

SEQ ID NO: 480 - DNA, 32 bp, synthetic construct; identical to SEQ ID NO: 187
  source 1..32: mol_type = other DNA
  misc_feature 22..23: note = DNA
  misc_feature order(1..21,24..32): note = RNA
  modified_base 21: mod_base = OTHER; note = 2-Prime-O-Methoxyethyl modified 5-methyl Cytidine
  modified_base 22: mod_base = OTHER; note = DNA nucleotide carrying a 6-amino-5-nitro-3-yl-2(1H)-pyridone nucleobase
  modified_base 23: mod_base = OTHER; note = DNA nucleotide carrying a hypoxanthine nucleobase
  modified_base order(12..13,25): mod_base = OTHER; note = 2-Prime-Fluoro modified nucleoside
  modified_base order(1..11,14..20,24,26..32): mod_base = OTHER; note = 2-Prime-O-Methyl modified nucleoside
  modified_base order(1^2,31^32): mod_base = OTHER; note = (1,3-dimethylimidazolidin-2-ylidene) Phosphoramidate linkage
  modified_base order(2..23,24..31): mod_base = OTHER; note = Phosphorothioate linkage
  modified_base 23^24: mod_base = OTHER; note = Methylphosphonate linkage
  misc_feature 1..32: note = RM109255

SEQ ID NO: 481 - DNA, 32 bp, synthetic construct; identical to SEQ ID NO: 5
  source 1..32: mol_type = other DNA
  misc_feature 19..20: note = DNA
  misc_feature order(1..18,21..32): note = RNA
  modified_base 18: mod_base = OTHER; note = 2-Prime-O-Methoxyethyl modified 5-methyl Cytidine
  modified_base 19: mod_base = OTHER; note = DNA nucleotide carrying a 6-amino-5-nitro-3-yl-2(1H)-pyridone nucleobase
  modified_base 20: mod_base = OTHER; note = DNA nucleotide carrying a hypoxanthine nucleobase
  modified_base order(9..10,22): mod_base = OTHER; note = 2-Prime-Fluoro modified nucleoside
  modified_base order(1..8,11..17,21,23..32): mod_base = OTHER; note = 2-Prime-O-Methyl modified nucleoside
  modified_base order(1^2,31^32): mod_base = OTHER; note = (1,3-dimethylimidazolidin-2-ylidene) Phosphoramidate linkage
  modified_base order(2..20,21..31): mod_base = OTHER; note = Phosphorothioate linkage
  modified_base 20^21: mod_base = OTHER; note = Methylphosphonate linkage
  misc_feature 1..32: note = RM109256

SEQ ID NO: 482 - DNA, 32 bp, synthetic construct; identical to SEQ ID NO: 189
  source 1..32: mol_type = other DNA
  misc_feature 16..17: note = DNA
  misc_feature order(1..15,18..32): note = RNA
  modified_base 15: mod_base = OTHER; note = 2-Prime-O-Methoxyethyl modified 5-methyl Cytidine
  modified_base 16: mod_base = OTHER; note = DNA nucleotide carrying a 6-amino-5-nitro-3-yl-2(1H)-pyridone nucleobase
  modified_base 17: mod_base = OTHER; note = DNA nucleotide carrying a hypoxanthine nucleobase
  modified_base order(6..7,19): mod_base = OTHER; note = 2-Prime-Fluoro modified nucleoside
  modified_base order(1..5,8..14,18,20..32): mod_base = OTHER; note = 2-Prime-O-Methyl modified nucleoside
  modified_base order(1^2,31^32): mod_base = OTHER; note = (1,3-dimethylimidazolidin-2-ylidene) Phosphoramidate linkage
  modified_base order(2..17,18..31): mod_base = OTHER; note = Phosphorothioate linkage
  modified_base 17^18: mod_base = OTHER; note = Methylphosphonate linkage
  misc_feature 1..32: note = RM109257

SEQ ID NO: 483 - DNA, 32 bp, synthetic construct; identical to SEQ ID NO: 190
  source 1..32: mol_type = other DNA
  misc_feature 13..14: note = DNA
  misc_feature order(1..12,15..32): note = RNA
  modified_base 12: mod_base = OTHER; note = 2-Prime-O-Methoxyethyl modified 5-methyl Cytidine
  modified_base 13: mod_base = OTHER; note = DNA nucleotide carrying a 6-amino-5-nitro-3-yl-2(1H)-pyridone nucleobase
  modified_base 14: mod_base = OTHER; note = DNA nucleotide carrying a hypoxanthine nucleobase
  modified_base order(3..4,16): mod_base = OTHER; note = 2-Prime-Fluoro modified nucleoside
  modified_base order(1..2,5..11,15,17..32): mod_base = OTHER; note = 2-Prime-O-Methyl modified nucleoside
  modified_base order(1^2,31^32): mod_base = OTHER; note = (1,3-dimethylimidazolidin-2-ylidene) Phosphoramidate linkage
  modified_base order(2..14,15..31): mod_base = OTHER; note = Phosphorothioate linkage
  modified_base 14^15: mod_base = OTHER; note = Methylphosphonate linkage
  misc_feature 1..32: note = RM109258

SEQ ID NO: 484 - DNA, 29 bp, synthetic construct
  source 1..29: mol_type = other DNA
  misc_feature 24..25: note = DNA
  misc_feature order(1..23,26..29): note = RNA
  modified_base 23: mod_base = OTHER; note = 2-Prime-O-Methoxyethyl modified 5-methyl Cytidine
  modified_base 24: mod_base = OTHER; note = DNA nucleotide carrying a 6-amino-5-nitro-3-yl-2(1H)-pyridone nucleobase
  modified_base 25: mod_base = OTHER; note = DNA nucleotide carrying a hypoxanthine nucleobase
  modified_base order(4,6,9,15,20..21,27,29): mod_base = OTHER; note = 2-Prime-Fluoro modified nucleoside
  modified_base order(1..3,5,7..8,10..14,16..19,22,26,28): mod_base = OTHER; note = 2-Prime-O-Methyl modified nucleoside
  modified_base order(1^2,28^29): mod_base = OTHER; note = (1,3-dimethylimidazolidin-2-ylidene) Phosphoramidate linkage
  modified_base order(2..25,26..28): mod_base = OTHER; note = Phosphorothioate linkage
  modified_base 25^26: mod_base = OTHER; note = Methylphosphonate linkage
  misc_feature 1..29: note = RM109259
ccgtgaggggcatgatgccatacnntgcc

SEQ ID NO: 485 - DNA, 29 bp, synthetic construct
  source 1..29: mol_type = other DNA
  misc_feature 21..22: note = DNA
  misc_feature order(1..20,23..29): note = RNA
  modified_base 20: mod_base = OTHER; note = 2-Prime-O-Methoxyethyl modified 5-methyl Cytidine
  modified_base 21: mod_base = OTHER; note = DNA nucleotide carrying a 6-amino-5-nitro-3-yl-2(1H)-pyridone nucleobase
  modified_base 22: mod_base = OTHER; note = DNA nucleotide carrying a hypoxanthine nucleobase
  modified_base order(1,3,6,12,17..18,24,26): mod_base = OTHER; note = 2-Prime-Fluoro modified nucleoside
  modified_base order(2,4..5,7..11,13..16,19,23,25,27..29): mod_base = OTHER; note = 2-Prime-O-Methyl modified nucleoside
  modified_base order(1^2,28^29): mod_base = OTHER; note = (1,3-dimethylimidazolidin-2-ylidene) Phosphoramidate linkage
  modified_base order(2..22,23..28): mod_base = OTHER; note = Phosphorothioate linkage
  modified_base 22^23: mod_base = OTHER; note = Methylphosphonate linkage
  misc_feature 1..29: note = RM109260
tgaggggcatgatgccatacnntgccacc

SEQ ID NO: 486 - DNA, 29 bp, synthetic construct
  source 1..29: mol_type = other DNA
  misc_feature 6..7: note = DNA
  misc_feature order(1..5,8..29): note = RNA
  modified_base 5: mod_base = OTHER; note = 2-Prime-O-Methoxyethyl modified 5-methyl Cytidine
  modified_base 6: mod_base = OTHER; note = DNA nucleotide carrying a 6-amino-5-nitro-3-yl-2(1H)-pyridone nucleobase
  modified_base 7: mod_base = OTHER; note = DNA nucleotide carrying a hypoxanthine nucleobase
  modified_base order(3,9,11..12,17,23,26,28): mod_base = OTHER; note = 2-Prime-Fluoro modified nucleoside
  modified_base order(1..2,4,8,10,13..16,18..22,24..25,27,29): mod_base = OTHER; note = 2-Prime-O-Methyl modified nucleoside
  modified_base order(1^2,28^29): mod_base = OTHER; note = (1,3-dimethylimidazolidin-2-ylidene) Phosphoramidate linkage
  modified_base order(2..7,8..28): mod_base = OTHER; note = Phosphorothioate linkage
  modified_base 7^8: mod_base = OTHER; note = Methylphosphonate linkage
  misc_feature 1..29: note = RM109261
catacnntgccaccagggcgatggccagc

SEQ ID NO: 487 - DNA, 26 bp, synthetic construct
  source 1..26: mol_type = other DNA
  misc_feature 19..20: note = DNA
  misc_feature order(1..18,21..26): note = RNA
  modified_base 18: mod_base = OTHER; note = 2-Prime-O-Methoxyethyl modified 5-methyl Cytidine
  modified_base 19: mod_base = OTHER; note = DNA nucleotide carrying a 6-amino-5-nitro-3-yl-2(1H)-pyridone nucleobase
  modified_base 20: mod_base = OTHER; note = DNA nucleotide carrying a hypoxanthine nucleobase
  modified_base order(10,15..16,22,24): mod_base = OTHER; note = 2-Prime-Fluoro modified nucleoside
  modified_base order(1..9,11..14,17,21,23,25..26): mod_base = OTHER; note = 2-Prime-O-Methyl modified nucleoside
  modified_base order(1^2,25^26): mod_base = OTHER; note = (1,3-dimethylimidazolidin-2-ylidene) Phosphoramidate linkage
  modified_base order(2..20,21..25): mod_base = OTHER; note = Phosphorothioate linkage
  modified_base 20^21: mod_base = OTHER; note = Methylphosphonate linkage
  misc_feature 1..26: note = RM109262
aggggcatgatgccatacnntgccac

SEQ ID NO: 488 - DNA, 26 bp, synthetic construct
  source 1..26: mol_type = other DNA
  misc_feature 16..17: note = DNA
  misc_feature order(1..15,18..26): note = RNA
  modified_base 15: mod_base = OTHER; note = 2-Prime-O-Methoxyethyl modified 5-methyl Cytidine
  modified_base 16: mod_base = OTHER; note = DNA nucleotide carrying a 6-amino-5-nitro-3-yl-2(1H)-pyridone nucleobase
  modified_base 17: mod_base = OTHER; note = DNA nucleotide carrying a hypoxanthine nucleobase
  modified_base order(7,12..13,19,21): mod_base = OTHER; note = 2-Prime-Fluoro modified nucleoside
  modified_base order(1..6,8..11,14,18,20,22..26): mod_base = OTHER; note = 2-Prime-O-Methyl modified nucleoside
  modified_base order(1^2,25^26): mod_base = OTHER; note = (1,3-dimethylimidazolidin-2-ylidene) Phosphoramidate linkage
  modified_base order(2..17,18..25): mod_base = OTHER; note = Phosphorothioate linkage
  modified_base 17^18: mod_base = OTHER; note = Methylphosphonate linkage
  misc_feature 1..26: note = RM109263
ggcatgatgccatacnntgccaccag

SEQ ID NO: 489 - DNA, 26 bp, synthetic construct
  source 1..26: mol_type = other DNA
  misc_feature 13..14: note = DNA
  misc_feature order(1..12,15..26): note = RNA
  modified_base 12: mod_base = OTHER; note = 2-Prime-O-Methoxyethyl modified 5-methyl Cytidine
  modified_base 13: mod_base = OTHER; note = DNA nucleotide carrying a 6-amino-5-nitro-3-yl-2(1H)-pyridone nucleobase
  modified_base 14: mod_base = OTHER; note = DNA nucleotide carrying a hypoxanthine nucleobase
  modified_base order(4,9..10,16,18): mod_base = OTHER; note = 2-Prime-Fluoro modified nucleoside
  modified_base order(1..3,5..8,11,15,17,19..26): mod_base = OTHER; note = 2-Prime-O-Methyl modified nucleoside
  modified_base order(1^2,25^26): mod_base = OTHER; note = (1,3-dimethylimidazolidin-2-ylidene) Phosphoramidate linkage
  modified_base order(2..14,15..25): mod_base = OTHER; note = Phosphorothioate linkage
  modified_base 14^15: mod_base = OTHER; note = Methylphosphonate linkage
  misc_feature 1..26: note = RM109264
atgatgccatacnntgccaccagggc

SEQ ID NO: 490 - DNA, 26 bp, synthetic construct
  source 1..26: mol_type = other DNA
  misc_feature 10..11: note = DNA
  misc_feature order(1..9,12..26): note = RNA
  modified_base 9: mod_base = OTHER; note = 2-Prime-O-Methoxyethyl modified 5-methyl Cytidine
  modified_base 10: mod_base = OTHER; note = DNA nucleotide carrying a 6-amino-5-nitro-3-yl-2(1H)-pyridone nucleobase
  modified_base 11: mod_base = OTHER; note = DNA nucleotide carrying a hypoxanthine nucleobase
  modified_base order(1,6..7,13,15): mod_base = OTHER; note = 2-Prime-Fluoro modified nucleoside
  modified_base order(2..5,8,12,14,16..26): mod_base = OTHER; note = 2-Prime-O-Methyl modified nucleoside
  modified_base order(1^2,25^26): mod_base = OTHER; note = (1,3-dimethylimidazolidin-2-ylidene) Phosphoramidate linkage
  modified_base order(2..11,12..25): mod_base = OTHER; note = Phosphorothioate linkage
  modified_base 11^12: mod_base = OTHER; note = Methylphosphonate linkage
  misc_feature 1..26: note = RM109265
atgccatacnntgccaccagggcgat

SEQ ID NO: 491 - DNA, 29 bp, synthetic construct
  source 1..29: mol_type = other DNA
  misc_feature 24..25: note = DNA
  misc_feature order(1..23,26..29): note = RNA
  modified_base 23: mod_base = OTHER; note = 2-Prime-O-Methoxyethyl modified 5-methyl Cytidine
  modified_base 24: mod_base = OTHER; note = DNA nucleotide carrying a 6-amino-5-nitro-3-yl-2(1H)-pyridone nucleobase
  modified_base 25: mod_base = OTHER; note = DNA nucleotide carrying a hypoxanthine nucleobase
  modified_base order(15,20..21,27,29): mod_base = OTHER; note = 2-Prime-Fluoro modified nucleoside
  modified_base order(1..14,16..19,22,26,28): mod_base = OTHER; note = 2-Prime-O-Methyl modified nucleoside
  modified_base order(1^2,28^29): mod_base = OTHER; note = (1,3-dimethylimidazolidin-2-ylidene) Phosphoramidate linkage
  modified_base order(2..25,26..28): mod_base = OTHER; note = Phosphorothioate linkage
  modified_base 25^26: mod_base = OTHER; note = Methylphosphonate linkage
  misc_feature 1..29: note = RM109266
ccgtgaggggcatgatgccatacnntgcc

SEQ ID NO: 492 - DNA, 29 bp, synthetic construct
  source 1..29: mol_type = other DNA
  misc_feature 21..22: note = DNA
  misc_feature order(1..20,23..29): note = RNA
  modified_base 20: mod_base = OTHER; note = 2-Prime-O-Methoxyethyl modified 5-methyl Cytidine
  modified_base 21: mod_base = OTHER; note = DNA nucleotide carrying a 6-amino-5-nitro-3-yl-2(1H)-pyridone nucleobase
  modified_base 22: mod_base = OTHER; note = DNA nucleotide carrying a hypoxanthine nucleobase
  modified_base order(12,17..18,24,26): mod_base = OTHER; note = 2-Prime-Fluoro modified nucleoside
  modified_base order(1..11,13..16,19,23,25,27..29): mod_base = OTHER; note = 2-Prime-O-Methyl modified nucleoside
  modified_base order(1^2,28^29): mod_base = OTHER; note = (1,3-dimethylimidazolidin-2-ylidene) Phosphoramidate linkage
  modified_base order(2..22,23..28): mod_base = OTHER; note = Phosphorothioate linkage
  modified_base 22^23: mod_base = OTHER; note = Methylphosphonate linkage
  misc_feature 1..29: note = RM109267
tgaggggcatgatgccatacnntgccacc

SEQ ID NO: 493 - DNA, 29 bp, synthetic construct
  source 1..29: mol_type = other DNA
  misc_feature 18..19: note = DNA
  misc_feature order(1..17,20..29): note = RNA
  modified_base 17: mod_base = OTHER; note = 2-Prime-O-Methoxyethyl modified 5-methyl Cytidine
  modified_base 18: mod_base = OTHER; note = DNA nucleotide carrying a 6-amino-5-nitro-3-yl-2(1H)-pyridone nucleobase
  modified_base 19: mod_base = OTHER; note = DNA nucleotide carrying a hypoxanthine nucleobase
  modified_base order(9,14..15,21,23): mod_base = OTHER; note = 2-Prime-Fluoro modified nucleoside
  modified_base order(1..8,10..13,16,20,22,24..29): mod_base = OTHER; note = 2-Prime-O-Methyl modified nucleoside
  modified_base order(1^2,28^29): mod_base = OTHER; note = (1,3-dimethylimidazolidin-2-ylidene) Phosphoramidate linkage
  modified_base order(2..19,20..28): mod_base = OTHER; note = Phosphorothioate linkage
  modified_base 19^20: mod_base = OTHER; note = Methylphosphonate linkage
  misc_feature 1..29: note = RM109268
ggggcatgatgccatacnntgccaccagg

SEQ ID NO: 494 - DNA, 29 bp, synthetic construct
  source 1..29: mol_type = other DNA
  misc_feature 15..16: note = DNA
  misc_feature order(1..14,17..29): note = RNA
  modified_base 14: mod_base = OTHER; note = 2-Prime-O-Methoxyethyl modified 5-methyl Cytidine
  modified_base 15: mod_base = OTHER; note = DNA nucleotide carrying a 6-amino-5-nitro-3-yl-2(1H)-pyridone nucleobase
  modified_base 16: mod_base = OTHER; note = DNA nucleotide carrying a hypoxanthine nucleobase
  modified_base order(6,11..12,18,20): mod_base = OTHER; note = 2-Prime-Fluoro modified nucleoside
  modified_base order(1..5,7..10,13,17,19,21..29): mod_base = OTHER; note = 2-Prime-O-Methyl modified nucleoside
  modified_base order(1^2,28^29): mod_base = OTHER; note = (1,3-dimethylimidazolidin-2-ylidene) Phosphoramidate linkage
  modified_base order(2..16,17..28): mod_base = OTHER; note = Phosphorothioate linkage
  modified_base 16^17: mod_base = OTHER; note = Methylphosphonate linkage
  misc_feature 1..29: note = RM109269
gcatgatgccatacnntgccaccagggcg

SEQ ID NO: 495 - DNA, 29 bp, synthetic construct
  source 1..29: mol_type = other DNA
  misc_feature 12..13: note = DNA
  misc_feature order(1..11,14..29): note = RNA
  modified_base 11: mod_base = OTHER; note = 2-Prime-O-Methoxyethyl modified 5-methyl Cytidine
  modified_base 12: mod_base = OTHER; note = DNA nucleotide carrying a 6-amino-5-nitro-3-yl-2(1H)-pyridone nucleobase
  modified_base 13: mod_base = OTHER; note = DNA nucleotide carrying a hypoxanthine nucleobase
  modified_base order(3,8..9,15,17): mod_base = OTHER; note = 2-Prime-Fluoro modified nucleoside
  modified_base order(1..2,4..7,10,14,16,18..29): mod_base = OTHER; note = 2-Prime-O-Methyl modified nucleoside
  modified_base order(1^2,28^29): mod_base = OTHER; note = (1,3-dimethylimidazolidin-2-ylidene) Phosphoramidate linkage
  modified_base order(2..13,14..28): mod_base = OTHER; note = Phosphorothioate linkage
  modified_base 13^14: mod_base = OTHER; note = Methylphosphonate linkage
  misc_feature 1..29: note = RM109270
tgatgccatacnntgccaccagggcgatg

SEQ ID NO: 496 - DNA, 26 bp, synthetic construct
  source 1..26: mol_type = other DNA
  misc_feature 13..14: note = DNA
  misc_feature order(1..12,15..26): note = RNA
  modified_base 12: mod_base = OTHER; note = 2-Prime-O-Methoxyethyl modified 5-methyl Cytidine
  modified_base 13: mod_base = OTHER; note = DNA nucleotide carrying a 6-amino-5-nitro-3-yl-2(1H)-pyridone nucleobase
  modified_base 14: mod_base = OTHER; note = DNA nucleotide carrying a hypoxanthine nucleobase
  modified_base order(10,16,18..19,24): mod_base = OTHER; note = 2-Prime-Fluoro modified nucleoside
  modified_base order(1..9,11,15,17,20..23,25..26): mod_base = OTHER; note = 2-Prime-O-Methyl modified nucleoside
  modified_base order(1^2,25^26): mod_base = OTHER; note = (1,3-dimethylimidazolidin-2-ylidene) Phosphoramidate linkage
  modified_base order(2..14,15..25): mod_base = OTHER; note = Phosphorothioate linkage
  modified_base 14^15: mod_base = OTHER; note = Methylphosphonate linkage
  misc_feature 1..26: note = RM109271
atgatgccatacnntgccaccagggc

SEQ ID NO: 497 - DNA, 26 bp, synthetic construct
  source 1..26: mol_type = other DNA
  misc_feature 10..11: note = DNA
  misc_feature order(1..9,12..26): note = RNA
  modified_base 9: mod_base = OTHER; note = 2-Prime-O-Methoxyethyl modified 5-methyl Cytidine
  modified_base 10: mod_base = OTHER; note = DNA nucleotide carrying a 6-amino-5-nitro-3-yl-2(1H)-pyridone nucleobase
  modified_base 11: mod_base = OTHER; note = DNA nucleotide carrying a hypoxanthine nucleobase
  modified_base order(7,13,15..16,21): mod_base = OTHER; note = 2-Prime-Fluoro modified nucleoside
  modified_base order(1..6,8,12,14,17..20,22..26): mod_base = OTHER; note = 2-Prime-O-Methyl modified nucleoside
  modified_base order(1^2,25^26): mod_base = OTHER; note = (1,3-dimethylimidazolidin-2-ylidene) Phosphoramidate linkage
  modified_base order(2..11,12..25): mod_base = OTHER; note = Phosphorothioate linkage
  modified_base 11^12: mod_base = OTHER; note = Methylphosphonate linkage
  misc_feature 1..26: note = RM109272
atgccatacnntgccaccagggcgat

SEQ ID NO: 498 - DNA, 26 bp, synthetic construct
  source 1..26: mol_type = other DNA
  misc_feature 7..8: note = DNA
  misc_feature order(1..6,9..26): note = RNA
  modified_base 6: mod_base = OTHER; note = 2-Prime-O-Methoxyethyl modified 5-methyl Cytidine
  modified_base 7: mod_base = OTHER; note = DNA nucleotide carrying a 6-amino-5-nitro-3-yl-2(1H)-pyridone nucleobase
  modified_base 8: mod_base = OTHER; note = DNA nucleotide carrying a hypoxanthine nucleobase
  modified_base order(4,10,12..13,18): mod_base = OTHER; note = 2-Prime-Fluoro modified nucleoside
  modified_base order(1..3,5,9,11,14..17,19..26): mod_base = OTHER; note = 2-Prime-O-Methyl modified nucleoside
  modified_base order(1^2,25^26): mod_base = OTHER; note = (1,3-dimethylimidazolidin-2-ylidene) Phosphoramidate linkage
  modified_base order(2..8,9..25): mod_base = OTHER; note = Phosphorothioate linkage
  modified_base 8^9: mod_base = OTHER; note = Methylphosphonate linkage
  misc_feature 1..26: note = RM109273
ccatacnntgccaccagggcgatggc

SEQ ID NO: 499 - DNA, 29 bp, synthetic construct
  source 1..29: mol_type = other DNA
  misc_feature 18..19: note = DNA
  misc_feature order(1..17,20..29): note = RNA
  modified_base 17: mod_base = OTHER; note = 2-Prime-O-Methoxyethyl modified 5-methyl Cytidine
  modified_base 18: mod_base = OTHER; note = DNA nucleotide carrying a 6-amino-5-nitro-3-yl-2(1H)-pyridone nucleobase
  modified_base 19: mod_base = OTHER; note = DNA nucleotide carrying a hypoxanthine nucleobase
  modified_base order(15,21,23..24,29): mod_base = OTHER; note = 2-Prime-Fluoro modified nucleoside
  modified_base order(1..14,16,20,22,25..28): mod_base = OTHER; note = 2-Prime-O-Methyl modified nucleoside
  modified_base order(1^2,28^29): mod_base = OTHER; note = (1,3-dimethylimidazolidin-2-ylidene) Phosphoramidate linkage
  modified_base order(2..19,20..28): mod_base = OTHER; note = Phosphorothioate linkage
  modified_base 19^20: mod_base = OTHER; note = Methylphosphonate linkage
  misc_feature 1..29: note = RM109274
ggggcatgatgccatacnntgccaccagg

SEQ ID NO: 500 - DNA, 29 bp, synthetic construct
  source 1..29: mol_type = other DNA
  misc_feature 15..16: note = DNA
  misc_feature order(1..14,17..29): note = RNA
  modified_base 14: mod_base = OTHER; note = 2-Prime-O-Methoxyethyl modified 5-methyl Cytidine
  modified_base 15: mod_base = OTHER; note = DNA nucleotide carrying a 6-amino-5-nitro-3-yl-2(1H)-pyridone nucleobase
  modified_base 16: mod_base = OTHER; note = DNA nucleotide carrying a hypoxanthine nucleobase
  modified_base order(12,18,20..21,26): mod_base = OTHER; note = 2-Prime-Fluoro modified nucleoside
  modified_base order(1..11,13,17,19,22..25,27..29): mod_base = OTHER; note = 2-Prime-O-Methyl modified nucleoside
  modified_base order(1^2,28^29): mod_base = OTHER; note = (1,3-dimethylimidazolidin-2-ylidene) Phosphoramidate linkage
  modified_base order(2..16,17..28): mod_base = OTHER; note = Phosphorothioate linkage
  modified_base 16^17: mod_base = OTHER; note = Methylphosphonate linkage
  misc_feature 1..29: note = RM109275
gcatgatgccatacnntgccaccagggcg

SEQ ID NO: 501 - DNA, 29 bp, synthetic construct
  source 1..29: mol_type = other DNA
  misc_feature 12..13: note = DNA
  misc_feature order(1..11,14..29): note = RNA
  modified_base 11: mod_base = OTHER; note = 2-Prime-O-Methoxyethyl modified 5-methyl Cytidine
  modified_base 12: mod_base = OTHER; note = DNA nucleotide carrying a 6-amino-5-nitro-3-yl-2(1H)-pyridone nucleobase
  modified_base 13: mod_base = OTHER; note = DNA nucleotide carrying a hypoxanthine nucleobase
  modified_base order(9,15,17..18,23): mod_base = OTHER; note = 2-Prime-Fluoro modified nucleoside
  modified_base order(1..8,10,14,16,19..22,24..29): mod_base = OTHER; note = 2-Prime-O-Methyl modified nucleoside
  modified_base order(1^2,28^29): mod_base = OTHER; note = (1,3-dimethylimidazolidin-2-ylidene) Phosphoramidate linkage
  modified_base order(2..13,14..28): mod_base = OTHER; note = Phosphorothioate linkage
  modified_base 13^14: mod_base = OTHER; note = Methylphosphonate linkage
  misc_feature 1..29: note = RM109276
tgatgccatacnntgccaccagggcgatg

SEQ ID NO: 502 - DNA, 29 bp, synthetic construct
  source 1..29: mol_type = other DNA
  misc_feature 9..10: note = DNA
  misc_feature order(1..8,11..29): note = RNA
  modified_base 8: mod_base = OTHER; note = 2-Prime-O-Methoxyethyl modified 5-methyl Cytidine
  modified_base 9: mod_base = OTHER; note = DNA nucleotide carrying a 6-amino-5-nitro-3-yl-2(1H)-pyridone nucleobase
  modified_base 10: mod_base = OTHER; note = DNA nucleotide carrying a hypoxanthine nucleobase
  modified_base order(6,12,14..15,20): mod_base = OTHER; note = 2-Prime-Fluoro modified nucleoside
  modified_base order(1..5,7,11,13,16..19,21..29): mod_base = OTHER; note = 2-Prime-O-Methyl modified nucleoside
  modified_base order(1^2,28^29): mod_base = OTHER; note = (1,3-dimethylimidazolidin-2-ylidene) Phosphoramidate linkage
  modified_base order(2..10,11..28): mod_base = OTHER; note = Phosphorothioate linkage
  modified_base 10^11: mod_base = OTHER; note = Methylphosphonate linkage
  misc_feature 1..29: note = RM109277
tgccatacnntgccaccagggcgatggcc

SEQ ID NO: 503 - DNA, 29 bp, synthetic construct
  source 1..29: mol_type = other DNA
  misc_feature 6..7: note = DNA
  misc_feature order(1..5,8..29): note = RNA
  modified_base 5: mod_base = OTHER; note = 2-Prime-O-Methoxyethyl modified 5-methyl Cytidine
  modified_base 6: mod_base = OTHER; note = DNA nucleotide carrying a 6-amino-5-nitro-3-yl-2(1H)-pyridone nucleobase
  modified_base 7: mod_base = OTHER; note = DNA nucleotide carrying a hypoxanthine nucleobase
  modified_base order(3,9,11..12,17): mod_base = OTHER; note = 2-Prime-Fluoro modified nucleoside
  modified_base order(1..2,4,8,10,13..16,18..29): mod_base = OTHER; note = 2-Prime-O-Methyl modified nucleoside
  modified_base order(1^2,28^29): mod_base = OTHER; note = (1,3-dimethylimidazolidin-2-ylidene) Phosphoramidate linkage
  modified_base order(2..7,8..28): mod_base = OTHER; note = Phosphorothioate linkage
  modified_base 7^8: mod_base = OTHER; note = Methylphosphonate linkage
  misc_feature 1..29: note = RM109278
catacnntgccaccagggcgatggccagc

SEQ ID NO: 504 - DNA, 32 bp, synthetic construct; identical to SEQ ID NO: 190
  source 1..32: mol_type = other DNA
  misc_feature 13..14: note = DNA
  misc_feature order(1..12,15..32): note = RNA
  modified_base 12: mod_base = OTHER; note = 2-Prime-O-Methoxyethyl modified 5-methyl Cytidine
  modified_base 13: mod_base = OTHER; note = DNA nucleotide carrying a 6-amino-5-nitro-3-yl-2(1H)-pyridone nucleobase
  modified_base 14: mod_base = OTHER; note = DNA nucleotide carrying a hypoxanthine nucleobase
  modified_base order(6..7,9,16,24..25,27..28,30): mod_base = OTHER; note = 2-Prime-Fluoro modified nucleoside
  modified_base order(1..5,8,10..11,15,17..23,26,29,31..32): mod_base = OTHER; note = 2-Prime-O-Methyl modified nucleoside
  modified_base order(1^2,31^32): mod_base = OTHER; note = (1,3-dimethylimidazolidin-2-ylidene) Phosphoramidate linkage
  modified_base order(2..14,15..31): mod_base = OTHER; note = Phosphorothioate linkage
  modified_base 14^15: mod_base = OTHER; note = Methylphosphonate linkage
  misc_feature 1..32: note = RM109279

SEQ ID NO: 505 - DNA, 32 bp, synthetic construct; identical to SEQ ID NO: 191
  source 1..32: mol_type = other DNA
  misc_feature 10..11: note = DNA
  misc_feature order(1..9,12..32): note = RNA
  modified_base 9: mod_base = OTHER; note = 2-Prime-O-Methoxyethyl modified 5-methyl Cytidine
  modified_base 10: mod_base = OTHER; note = DNA nucleotide carrying a 6-amino-5-nitro-3-yl-2(1H)-pyridone nucleobase
  modified_base 11: mod_base = OTHER; note = DNA nucleotide carrying a hypoxanthine nucleobase
  modified_base order(3..4,6,13,21..22,24..25,27): mod_base = OTHER; note = 2-Prime-Fluoro modified nucleoside
  modified_base order(1..2,5,7..8,12,14..20,23,26,28..32): mod_base = OTHER; note = 2-Prime-O-Methyl modified nucleoside
  modified_base order(1^2,31^32): mod_base = OTHER; note = (1,3-dimethylimidazolidin-2-ylidene) Phosphoramidate linkage
  modified_base order(2..11,12..31): mod_base = OTHER; note = Phosphorothioate linkage
  modified_base 11^12: mod_base = OTHER; note = Methylphosphonate linkage
  misc_feature 1..32: note = RM109280

SEQ ID NO: 506 - DNA, 32 bp, synthetic construct; identical to SEQ ID NO: 187
  source 1..32: mol_type = other DNA
  misc_feature 22..23: note = DNA
  misc_feature order(1..21,24..32): note = RNA
  modified_base 21: mod_base = OTHER; note = 2-Prime-O-Methoxyethyl modified 5-methyl Cytidine
  modified_base 22: mod_base = OTHER; note = DNA nucleotide carrying a 6-amino-5-nitro-3-yl-2(1H)-pyridone nucleobase
  modified_base 23: mod_base = OTHER; note = DNA nucleotide carrying a hypoxanthine nucleobase
  modified_base order(7,9..10,12..13,25,28,30..31): mod_base = OTHER; note = 2-Prime-Fluoro modified nucleoside
  modified_base order(1..6,8,11,14..20,24,26..27,29,32): mod_base = OTHER; note = 2-Prime-O-Methyl modified nucleoside
  modified_base order(1^2,31^32): mod_base = OTHER; note = (1,3-dimethylimidazolidin-2-ylidene) Phosphoramidate linkage
  modified_base order(2..23,24..31): mod_base = OTHER; note = Phosphorothioate linkage
  modified_base 23^24: mod_base = OTHER; note = Methylphosphonate linkage
  misc_feature 1..32: note = RM109281

SEQ ID NO: 507 - DNA, 32 bp, synthetic construct; identical to SEQ ID NO: 5
  source 1..32: mol_type = other DNA
  misc_feature 19..20: note = DNA
  misc_feature order(1..18,21..32): note = RNA
  modified_base 18: mod_base = OTHER; note = 2-Prime-O-Methoxyethyl modified 5-methyl Cytidine
  modified_base 19: mod_base = OTHER; note = DNA nucleotide carrying a 6-amino-5-nitro-3-yl-2(1H)-pyridone nucleobase
  modified_base 20: mod_base = OTHER; note = DNA nucleotide carrying a hypoxanthine nucleobase
  modified_base order(4,6..7,9..10,22,25,27..28): mod_base = OTHER; note = 2-Prime-Fluoro modified nucleoside
  modified_base order(1..3,5,8,11..17,21,23..24,26,29..32): mod_base = OTHER; note = 2-Prime-O-Methyl modified nucleoside
  modified_base order(1^2,31^32): mod_base = OTHER; note = (1,3-dimethylimidazolidin-2-ylidene) Phosphoramidate linkage
  modified_base order(2..20,21..31): mod_base = OTHER; note = Phosphorothioate linkage
  modified_base 20^21: mod_base = OTHER; note = Methylphosphonate linkage
  misc_feature 1..32: note = RM109282

SEQ ID NO: 508 - DNA, 32 bp, synthetic construct; identical to SEQ ID NO: 189
  source 1..32: mol_type = other DNA
  misc_feature 16..17: note = DNA
  misc_feature order(1..15,18..32): note = RNA
  modified_base 15: mod_base = OTHER; note = 2-Prime-O-Methoxyethyl modified 5-methyl Cytidine
  modified_base 16: mod_base = OTHER; note = DNA nucleotide carrying a 6-amino-5-nitro-3-yl-2(1H)-pyridone nucleobase
  modified_base 17: mod_base = OTHER; note = DNA nucleotide carrying a hypoxanthine nucleobase
  modified_base order(1,3..4,6..7,19,22,24..25): mod_base = OTHER; note = 2-Prime-Fluoro modified nucleoside
  modified_base order(2,5,8..14,18,20..21,23,26..32): mod_base = OTHER; note = 2-Prime-O-Methyl modified nucleoside
  modified_base order(1^2,31^32): mod_base = OTHER; note = (1,3-dimethylimidazolidin-2-ylidene) Phosphoramidate linkage
  modified_base order(2..17,18..31): mod_base = OTHER; note = Phosphorothioate linkage
  modified_base 17^18: mod_base = OTHER; note = Methylphosphonate linkage
  misc_feature 1..32: note = RM109283

SEQ ID NO: 509 - DNA, 23 bp, synthetic construct
  source 1..23: mol_type = other DNA
  misc_feature 9..10: note = DNA
  misc_feature order(1..8,11..23): note = RNA
  modified_base 8: mod_base = OTHER; note = 2-Prime-O-Methoxyethyl modified 5-methyl Cytidine
  modified_base 9: mod_base = OTHER; note = DNA nucleotide carrying a 6-amino-5-nitro-3-yl-2(1H)-pyridone nucleobase
  modified_base 10: mod_base = OTHER; note = DNA nucleotide carrying a hypoxanthine nucleobase
  modified_base order(3,5,12,20..21,23): mod_base = OTHER; note = 2-Prime-Fluoro modified nucleoside
  modified_base order(1..2,4,6..7,11,13..19,22): mod_base = OTHER; note = 2-Prime-O-Methyl modified nucleoside
  modified_base order(1^2,22^23): mod_base = OTHER; note = (1,3-dimethylimidazolidin-2-ylidene) Phosphoramidate linkage
  modified_base order(2..10,11..22): mod_base = OTHER; note = Phosphorothioate linkage
  modified_base 10^11: mod_base = OTHER; note = Methylphosphonate linkage
  misc_feature 1..23: note = RM109284
tgccatacnntgccaccagggcg

SEQ ID NO: 510 - DNA, 32 bp, synthetic construct; identical to SEQ ID NO: 189
  source 1..32: mol_type = other DNA
  misc_feature 16..17: note = DNA
  misc_feature order(1..15,18..32): note = RNA
  modified_base 15: mod_base = OTHER; note = 2-Prime-O-Methoxyethyl modified 5-methyl Cytidine
  modified_base 16: mod_base = OTHER; note = DNA nucleotide carrying a 6-amino-5-nitro-3-yl-2(1H)-pyridone nucleobase
  modified_base 17: mod_base = OTHER; note = DNA nucleotide carrying a hypoxanthine nucleobase
  modified_base order(10,12,19,27..28,30): mod_base = OTHER; note = 2-Prime-Fluoro modified nucleoside
  modified_base order(1..9,11,13..14,18,20..26,29,31..32): mod_base = OTHER; note = 2-Prime-O-Methyl modified nucleoside
  modified_base order(1^2,31^32): mod_base = OTHER; note = (1,3-dimethylimidazolidin-2-ylidene) Phosphoramidate linkage
  modified_base order(2..17,18..31): mod_base = OTHER; note = Phosphorothioate linkage
  modified_base 17^18: mod_base = OTHER; note = Methylphosphonate linkage
  misc_feature 1..32: note = RM109285

SEQ ID NO: 511 - DNA, 32 bp, synthetic construct; identical to SEQ ID NO: 190
  source 1..32: mol_type = other DNA
  misc_feature 13..14: note = DNA
  misc_feature order(1..12,15..32): note = RNA
  modified_base 12: mod_base = OTHER; note = 2-Prime-O-Methoxyethyl modified 5-methyl Cytidine
  modified_base 13: mod_base = OTHER; note = DNA nucleotide carrying a 6-amino-5-nitro-3-yl-2(1H)-pyridone nucleobase
  modified_base 14: mod_base = OTHER; note = DNA nucleotide carrying a hypoxanthine nucleobase
  modified_base order(7,9,16,24..25,27): mod_base = OTHER; note = 2-Prime-Fluoro modified nucleoside
  modified_base order(1..6,8,10..11,15,17..23,26,28..32): mod_base = OTHER; note = 2-Prime-O-Methyl modified nucleoside
  modified_base order(1^2,31^32): mod_base = OTHER; note = (1,3-dimethylimidazolidin-2-ylidene) Phosphoramidate linkage
  modified_base order(2..14,15..31): mod_base = OTHER; note = Phosphorothioate linkage
  modified_base 14^15: mod_base = OTHER; note = Methylphosphonate linkage
  misc_feature 1..32: note = RM109286

SEQ ID NO: 512 - DNA, 32 bp, synthetic construct; identical to SEQ ID NO: 191
  source 1..32: mol_type = other DNA
  misc_feature 10..11: note = DNA
  misc_feature order(1..9,12..32): note = RNA
  modified_base 9: mod_base = OTHER; note = 2-Prime-O-Methoxyethyl modified 5-methyl Cytidine
  modified_base 10: mod_base = OTHER; note = DNA nucleotide carrying a 6-amino-5-nitro-3-yl-2(1H)-pyridone nucleobase
  modified_base 11: mod_base = OTHER; note = DNA nucleotide carrying a hypoxanthine nucleobase
  modified_base order(4,6,13,21..22,24): mod_base = OTHER; note = 2-Prime-Fluoro modified nucleoside
  modified_base order(1..3,5,7..8,12,14..20,23,25..32): mod_base = OTHER; note = 2-Prime-O-Methyl modified nucleoside
  modified_base order(1^2,31^32): mod_base = OTHER; note = (1,3-dimethylimidazolidin-2-ylidene) Phosphoramidate linkage
  modified_base order(2..11,12..31): mod_base = OTHER; note = Phosphorothioate linkage
  modified_base 11^12: mod_base = OTHER; note = Methylphosphonate linkage
  misc_feature 1..32: note = RM109287

SEQ ID NO: 513 - DNA, 32 bp, synthetic construct; identical to SEQ ID NO: 192
  source 1..32: mol_type = other DNA
  misc_feature 7..8: note = DNA
  misc_feature order(1..6,9..32): note = RNA
  modified_base 6: mod_base = OTHER; note = 2-Prime-O-Methoxyethyl modified 5-methyl Cytidine
  modified_base 7: mod_base = OTHER; note = DNA nucleotide carrying a 6-amino-5-nitro-3-yl-2(1H)-pyridone nucleobase
  modified_base 8: mod_base = OTHER; note = DNA nucleotide carrying a hypoxanthine nucleobase
  modified_base order(1,3,10,18..19,21): mod_base = OTHER; note = 2-Prime-Fluoro modified nucleoside
  modified_base order(2,4..5,9,11..17,20,22..32): mod_base = OTHER; note = 2-Prime-O-Methyl modified nucleoside
  modified_base order(1^2,31^32): mod_base = OTHER; note = (1,3-dimethylimidazolidin-2-ylidene) Phosphoramidate linkage
  modified_base order(2..8,9..31): mod_base = OTHER; note = Phosphorothioate linkage
  modified_base 8^9: mod_base = OTHER; note = Methylphosphonate linkage
  misc_feature 1..32: note = RM109288

SEQ ID NO: 514 - DNA, 23 bp, synthetic construct
  source 1..23: mol_type = other DNA
  misc_feature 15..16: note = DNA
  misc_feature order(1..14,17..23): note = RNA
  modified_base 14: mod_base = OTHER; note = 2-Prime-O-Methoxyethyl modified 5-methyl Cytidine
  modified_base 15: mod_base = OTHER; note = DNA nucleotide carrying a 6-amino-5-nitro-3-yl-2(1H)-pyridone nucleobase
  modified_base 16: mod_base = OTHER; note = DNA nucleotide carrying a hypoxanthine nucleobase
  modified_base order(3,5..6,18,21,23): mod_base = OTHER; note = 2-Prime-Fluoro modified nucleoside
  modified_base order(1..2,4,7..13,17,19..20,22): mod_base = OTHER; note = 2-Prime-O-Methyl modified nucleoside
  modified_base order(1^2,22^23): mod_base = OTHER; note = (1,3-dimethylimidazolidin-2-ylidene) Phosphoramidate linkage
  modified_base order(2..16,17..22): mod_base = OTHER; note = Phosphorothioate linkage
  modified_base 16^17: mod_base = OTHER; note = Methylphosphonate linkage
  misc_feature 1..23: note = RM109289
gcatgatgccatacnntgccacc

SEQ ID NO: 515 - DNA, 32 bp, synthetic construct; identical to SEQ ID NO: 187
  source 1..32: mol_type = other DNA
  misc_feature 22..23: note = DNA
  misc_feature order(1..21,24..32): note = RNA
  modified_base 21: mod_base = OTHER; note = 2-Prime-O-Methoxyethyl modified 5-methyl Cytidine
  modified_base 22: mod_base = OTHER; note = DNA nucleotide carrying a 6-amino-5-nitro-3-yl-2(1H)-pyridone nucleobase
  modified_base 23: mod_base = OTHER; note = DNA nucleotide carrying a hypoxanthine nucleobase
  modified_base order(10,12..13,25,28,30): mod_base = OTHER; note = 2-Prime-Fluoro modified nucleoside
  modified_base order(1..9,11,14..20,24,26..27,29,31..32): mod_base = OTHER; note = 2-Prime-O-Methyl modified nucleoside
  modified_base order(1^2,31^32): mod_base = OTHER; note = (1,3-dimethylimidazolidin-2-ylidene) Phosphoramidate linkage
  modified_base order(2..23,24..31): mod_base = OTHER; note = Phosphorothioate linkage
  modified_base 23^24: mod_base = OTHER; note = Methylphosphonate linkage
  misc_feature 1..32: note = RM109290

SEQ ID NO: 516 - DNA, 32 bp, synthetic construct; identical to SEQ ID NO: 5
  source 1..32: mol_type = other DNA
  misc_feature 19..20: note = DNA
  misc_feature order(1..18,21..32): note = RNA
  modified_base 18: mod_base = OTHER; note = 2-Prime-O-Methoxyethyl modified 5-methyl Cytidine
  modified_base 19: mod_base = OTHER; note = DNA nucleotide carrying a 6-amino-5-nitro-3-yl-2(1H)-pyridone nucleobase
  modified_base 20: mod_base = OTHER; note = DNA nucleotide carrying a hypoxanthine nucleobase
  modified_base order(7,9..10,22,25,27): mod_base = OTHER; note = 2-Prime-Fluoro modified nucleoside
  modified_base order(1..6,8,11..17,21,23..24,26,28..32): mod_base = OTHER; note = 2-Prime-O-Methyl modified nucleoside
  modified_base order(1^2,31^32): mod_base = OTHER; note = (1,3-dimethylimidazolidin-2-ylidene) Phosphoramidate linkage
  modified_base order(2..20,21..31): mod_base = OTHER; note = Phosphorothioate linkage
  modified_base 20^21: mod_base = OTHER; note = Methylphosphonate linkage
  misc_feature 1..32: note = RM109291

SEQ ID NO: 517 - DNA, 32 bp, synthetic construct; identical to SEQ ID NO: 189
  source 1..32: mol_type = other DNA
  misc_feature 16..17: note = DNA
  misc_feature order(1..15,18..32): note = RNA
  modified_base 15: mod_base = OTHER; note = 2-Prime-O-Methoxyethyl modified 5-methyl Cytidine
  modified_base 16: mod_base = OTHER; note = DNA nucleotide carrying a 6-amino-5-nitro-3-yl-2(1H)-pyridone nucleobase
  modified_base 17: mod_base = OTHER; note = DNA nucleotide carrying a hypoxanthine nucleobase
  modified_base order(4,6..7,19,22,24): mod_base = OTHER; note = 2-Prime-Fluoro modified nucleoside
  modified_base order(1..3,5,8..14,18,20..21,23,25..32): mod_base = OTHER; note = 2-Prime-O-Methyl modified nucleoside
  modified_base order(1^2,31^32): mod_base = OTHER; note = (1,3-dimethylimidazolidin-2-ylidene) Phosphoramidate linkage
  modified_base order(2..17,18..31): mod_base = OTHER; note = Phosphorothioate linkage
  modified_base 17^18: mod_base = OTHER; note = Methylphosphonate linkage
  misc_feature 1..32: note = RM109292

SEQ ID NO: 518 - DNA, 32 bp, synthetic construct; identical to SEQ ID NO: 190
  source 1..32: mol_type = other DNA
  misc_feature 13..14: note = DNA
  misc_feature order(1..12,15..32): note = RNA
  modified_base 12: mod_base = OTHER; note = 2-Prime-O-Methoxyethyl modified 5-methyl Cytidine
  modified_base 13: mod_base = OTHER; note = DNA nucleotide carrying a 6-amino-5-nitro-3-yl-2(1H)-pyridone nucleobase
  modified_base 14: mod_base = OTHER; note = DNA nucleotide carrying a hypoxanthine nucleobase
  modified_base order(1,3..4,16,19,21): mod_base = OTHER; note = 2-Prime-Fluoro modified nucleoside
  modified_base order(2,5..11,15,17..18,20,22..32): mod_base = OTHER; note = 2-Prime-O-Methyl modified nucleoside
  modified_base order(1^2,31^32): mod_base = OTHER; note = (1,3-dimethylimidazolidin-2-ylidene) Phosphoramidate linkage
  modified_base order(2..14,15..31): mod_base = OTHER; note = Phosphorothioate linkage
  modified_base 14^15: mod_base = OTHER; note = Methylphosphonate linkage
  misc_feature 1..32: note = RM109293

SEQ ID NO: 519 - DNA, 32 bp, synthetic construct; identical to SEQ ID NO: 5
  source 1..32: mol_type = other DNA
  misc_feature 19..20: note = DNA
  misc_feature order(1..18,21..32): note = RNA
  modified_base 18: mod_base = OTHER; note = 2-Prime-O-Methoxyethyl modified 5-methyl Cytidine
  modified_base 19: mod_base = OTHER; note = DNA nucleotide carrying a 6-amino-5-nitro-3-yl-2(1H)-pyridone nucleobase
  modified_base 20: mod_base = OTHER; note = DNA nucleotide carrying a hypoxanthine nucleobase
  modified_base order(15,22,30): mod_base = OTHER; note = 2-Prime-Fluoro modified nucleoside
  modified_base order(1..14,16..17,21,23..29,31..32): mod_base = OTHER; note = 2-Prime-O-Methyl modified nucleoside
  modified_base order(1^2,31^32): mod_base = OTHER; note = (1,3-dimethylimidazolidin-2-ylidene) Phosphoramidate linkage
  modified_base order(2..20,21..31): mod_base = OTHER; note = Phosphorothioate linkage
  modified_base 20^21: mod_base = OTHER; note = Methylphosphonate linkage
  misc_feature 1..32: note = RM109294

SEQ ID NO: 520 - DNA, 32 bp, synthetic construct; identical to SEQ ID NO: 189
  source 1..32: mol_type = other DNA
  misc_feature 16..17: note = DNA
  misc_feature order(1..15,18..32): note = RNA
  modified_base 15: mod_base = OTHER; note = 2-Prime-O-Methoxyethyl modified 5-methyl Cytidine
  modified_base 16: mod_base = OTHER; note = DNA nucleotide carrying a 6-amino-5-nitro-3-yl-2(1H)-pyridone nucleobase
  modified_base 17: mod_base = OTHER; note = DNA nucleotide carrying a hypoxanthine nucleobase
  modified_base order(12,19,27): mod_base = OTHER; note = 2-Prime-Fluoro modified nucleoside
  modified_base order(1..11,13..14,18,20..26,28..32): mod_base = OTHER; note = 2-Prime-O-Methyl modified nucleoside
  modified_base order(1^2,31^32): mod_base = OTHER; note = (1,3-dimethylimidazolidin-2-ylidene) Phosphoramidate linkage
  modified_base order(2..17,18..31): mod_base = OTHER; note = Phosphorothioate linkage
  modified_base 17^18: mod_base = OTHER; note = Methylphosphonate linkage
  misc_feature 1..32: note = RM109295

SEQ ID NO: 521 - DNA, 32 bp, synthetic construct; identical to SEQ ID NO: 190
  source 1..32: mol_type = other DNA
  misc_feature 13..14: note = DNA
  misc_feature order(1..12,15..32): note = RNA
  modified_base 12: mod_base = OTHER; note = 2-Prime-O-Methoxyethyl modified 5-methyl Cytidine
  modified_base 13: mod_base = OTHER; note = DNA nucleotide carrying a 6-amino-5-nitro-3-yl-2(1H)-pyridone nucleobase
  modified_base 14: mod_base = OTHER; note = DNA nucleotide carrying a hypoxanthine nucleobase
  modified_base order(9,16,24): mod_base = OTHER; note = 2-Prime-Fluoro modified nucleoside
  modified_base order(1..8,10..11,15,17..23,25..32): mod_base = OTHER; note = 2-Prime-O-Methyl modified nucleoside
  modified_base order(1^2,31^32): mod_base = OTHER; note = (1,3-dimethylimidazolidin-2-ylidene) Phosphoramidate linkage
  modified_base order(2..14,15..31): mod_base = OTHER; note = Phosphorothioate linkage
  modified_base 14^15: mod_base = OTHER; note = Methylphosphonate linkage
  misc_feature 1..32: note = RM109296

SEQ ID NO: 522 - DNA, 32 bp, synthetic construct; identical to SEQ ID NO: 191
  source 1..32: mol_type = other DNA
  misc_feature 10..11: note = DNA
  misc_feature order(1..9,12..32): note = RNA
  modified_base 9: mod_base = OTHER; note = 2-Prime-O-Methoxyethyl modified 5-methyl Cytidine
  modified_base 10: mod_base = OTHER; note = DNA nucleotide carrying a 6-amino-5-nitro-3-yl-2(1H)-pyridone nucleobase
  modified_base 11: mod_base = OTHER; note = DNA nucleotide carrying a hypoxanthine nucleobase
  modified_base order(6,13,21): mod_base = OTHER; note = 2-Prime-Fluoro modified nucleoside
  modified_base order(1..5,7..8,12,14..20,22..32): mod_base = OTHER; note = 2-Prime-O-Methyl modified nucleoside
  modified_base order(1^2,31^32): mod_base = OTHER; note = (1,3-dimethylimidazolidin-2-ylidene) Phosphoramidate linkage
  modified_base order(2..11,12..31): mod_base = OTHER; note = Phosphorothioate linkage
  modified_base 11^12: mod_base = OTHER; note = Methylphosphonate linkage
  misc_feature 1..32: note = RM109297

SEQ ID NO: 523 - DNA, 32 bp, synthetic construct; identical to SEQ ID NO: 192
  source 1..32: mol_type = other DNA
  misc_feature 7..8: note = DNA
  misc_feature order(1..6,9..32): note = RNA
  modified_base 6: mod_base = OTHER; note = 2-Prime-O-Methoxyethyl modified 5-methyl Cytidine
  modified_base 7: mod_base = OTHER; note = DNA nucleotide carrying a 6-amino-5-nitro-3-yl-2(1H)-pyridone nucleobase
  modified_base 8: mod_base = OTHER; note = DNA nucleotide carrying a hypoxanthine nucleobase
  modified_base order(3,10,18): mod_base = OTHER; note = 2-Prime-Fluoro modified nucleoside
  modified_base order(1..2,4..5,9,11..17,19..32): mod_base = OTHER; note = 2-Prime-O-Methyl modified nucleoside
  modified_base order(1^2,31^32): mod_base = OTHER; note = (1,3-dimethylimidazolidin-2-ylidene) Phosphoramidate linkage
  modified_base order(2..8,9..31): mod_base = OTHER; note = Phosphorothioate linkage
  modified_base 8^9: mod_base = OTHER; note = Methylphosphonate linkage
  misc_feature 1..32: note = RM109298

SEQ ID NO: 524 - DNA, 32 bp, synthetic construct; identical to SEQ ID NO: 186
  source 1..32: mol_type = other DNA
  misc_feature 25..26: note = DNA
  misc_feature order(1..24,27..32): note = RNA
  modified_base 24: mod_base = OTHER; note = 2-Prime-O-Methoxyethyl modified 5-methyl Cytidine
  modified_base 25: mod_base = OTHER; note = DNA nucleotide carrying a 6-amino-5-nitro-3-yl-2(1H)-pyridone nucleobase
  modified_base 26: mod_base = OTHER; note = DNA nucleotide carrying a hypoxanthine nucleobase
  modified_base order(16,28,31): mod_base = OTHER; note = 2-Prime-Fluoro modified nucleoside
  modified_base order(1..15,17..23,27,29..30,32): mod_base = OTHER; note = 2-Prime-O-Methyl modified nucleoside
  modified_base order(1^2,31^32): mod_base = OTHER; note = (1,3-dimethylimidazolidin-2-ylidene) Phosphoramidate linkage
  modified_base order(2..26,27..31): mod_base = OTHER; note = Phosphorothioate linkage
  modified_base 26^27: mod_base = OTHER; note = Methylphosphonate linkage
  misc_feature 1..32: note = RM109299

SEQ ID NO: 525 - DNA, 32 bp, synthetic construct; identical to SEQ ID NO: 187
  source 1..32: mol_type = other DNA
  misc_feature 22..23: note = DNA
  misc_feature order(1..21,24..32): note = RNA
  modified_base 21: mod_base = OTHER; note = 2-Prime-O-Methoxyethyl modified 5-methyl Cytidine
  modified_base 22: mod_base = OTHER; note = DNA nucleotide carrying a 6-amino-5-nitro-3-yl-2(1H)-pyridone nucleobase
  modified_base 23: mod_base = OTHER; note = DNA nucleotide carrying a hypoxanthine nucleobase
  modified_base order(13,25,28): mod_base = OTHER; note = 2-Prime-Fluoro modified nucleoside
  modified_base order(1..12,14..20,24,26..27,29..32): mod_base = OTHER; note = 2-Prime-O-Methyl modified nucleoside
  modified_base order(1^2,31^32): mod_base = OTHER; note = (1,3-dimethylimidazolidin-2-ylidene) Phosphoramidate linkage
  modified_base order(2..23,24..31): mod_base = OTHER; note = Phosphorothioate linkage
  modified_base 23^24: mod_base = OTHER; note = Methylphosphonate linkage
  misc_feature 1..32: note = RM109300

SEQ ID NO: 526 - DNA, 32 bp, synthetic construct; identical to SEQ ID NO: 5
  source 1..32: mol_type = other DNA
  misc_feature 19..20: note = DNA
  misc_feature order(1..18,21..32): note = RNA
  modified_base 18: mod_base = OTHER; note = 2-Prime-O-Methoxyethyl modified 5-methyl Cytidine
  modified_base 19: mod_base = OTHER; note = DNA nucleotide carrying a 6-amino-5-nitro-3-yl-2(1H)-pyridone nucleobase
  modified_base 20: mod_base = OTHER; note = DNA nucleotide carrying a hypoxanthine nucleobase
  modified_base order(10,22,25): mod_base = OTHER; note = 2-Prime-Fluoro modified nucleoside
  modified_base order(1..9,11..17,21,23..24,26..32): mod_base = OTHER; note = 2-Prime-O-Methyl modified nucleoside
  modified_base order(1^2,31^32): mod_base = OTHER; note = (1,3-dimethylimidazolidin-2-ylidene) Phosphoramidate linkage
  modified_base order(2..20,21..31): mod_base = OTHER; note = Phosphorothioate linkage
  modified_base 20^21: mod_base = OTHER; note = Methylphosphonate linkage
  misc_feature 1..32: note = RM109301

SEQ ID NO: 527 - DNA, 32 bp, synthetic construct; identical to SEQ ID NO: 189
  source 1..32: mol_type = other DNA
  misc_feature 16..17: note = DNA
  misc_feature order(1..15,18..32): note = RNA
  modified_base 15: mod_base = OTHER; note = 2-Prime-O-Methoxyethyl modified 5-methyl Cytidine
  modified_base 16: mod_base = OTHER; note = DNA nucleotide carrying a 6-amino-5-nitro-3-yl-2(1H)-pyridone nucleobase
  modified_base 17: mod_base = OTHER; note = DNA nucleotide carrying a hypoxanthine nucleobase
  modified_base order(7,19,22): mod_base = OTHER; note = 2-Prime-Fluoro modified nucleoside
  modified_base order(1..6,8..14,18,20..21,23..32): mod_base = OTHER; note = 2-Prime-O-Methyl modified nucleoside
  modified_base order(1^2,31^32): mod_base = OTHER; note = (1,3-dimethylimidazolidin-2-ylidene) Phosphoramidate linkage
  modified_base order(2..17,18..31): mod_base = OTHER; note = Phosphorothioate linkage
  modified_base 17^18: mod_base = OTHER; note = Methylphosphonate linkage
  misc_feature 1..32: note = RM109302

SEQ ID NO: 528 - DNA, 32 bp, synthetic construct; identical to SEQ ID NO: 190
  source 1..32: mol_type = other DNA
  misc_feature 13..14: note = DNA
  misc_feature order(1..12,15..32): note = RNA
  modified_base 12: mod_base = OTHER; note = 2-Prime-O-Methoxyethyl modified 5-methyl Cytidine
  modified_base 13: mod_base = OTHER; note = DNA nucleotide carrying a 6-amino-5-nitro-3-yl-2(1H)-pyridone nucleobase
  modified_base 14: mod_base = OTHER; note = DNA nucleotide carrying a hypoxanthine nucleobase
  modified_base order(4,16,19): mod_base = OTHER; note = 2-Prime-Fluoro modified nucleoside
  modified_base order(1..3,5..11,15,17..18,20..32): mod_base = OTHER; note = 2-Prime-O-Methyl modified nucleoside
  modified_base order(1^2,31^32): mod_base = OTHER; note = (1,3-dimethylimidazolidin-2-ylidene) Phosphoramidate linkage
  modified_base order(2..14,15..31): mod_base = OTHER; note = Phosphorothioate linkage
  modified_base 14^15: mod_base = OTHER; note = Methylphosphonate linkage
  misc_feature 1..32: note = RM109303

SEQ ID NO: 529 - DNA, 32 bp, synthetic construct; identical to SEQ ID NO: 191
  source 1..32: mol_type = other DNA
  misc_feature 10..11: note = DNA
  misc_feature order(1..9,12..32): note = RNA
  modified_base 9: mod_base = OTHER; note = 2-Prime-O-Methoxyethyl modified 5-methyl Cytidine
  modified_base 10: mod_base = OTHER; note = DNA nucleotide carrying a 6-amino-5-nitro-3-yl-2(1H)-pyridone nucleobase
  modified_base 11: mod_base = OTHER; note = DNA nucleotide carrying a hypoxanthine nucleobase
  modified_base order(1,13,16): mod_base = OTHER; note = 2-Prime-Fluoro modified nucleoside
  modified_base order(2..8,12,14..15,17..32): mod_base = OTHER; note = 2-Prime-O-Methyl modified nucleoside
  modified_base order(1^2,31^32): mod_base = OTHER; note = (1,3-dimethylimidazolidin-2-ylidene) Phosphoramidate linkage
  modified_base order(2..11,12..31): mod_base = OTHER; note = Phosphorothioate linkage
  modified_base 11^12: mod_base = OTHER; note = Methylphosphonate linkage
  misc_feature 1..32: note = RM109304

SEQ ID NO: 530 - DNA, 29 bp, synthetic construct
  source 1..29: mol_type = other DNA
  misc_feature 18..19: note = DNA
  misc_feature order(1..17,20..29): note = RNA
  modified_base 17: mod_base = OTHER; note = 2-Prime-O-Methoxyethyl modified 5-methyl Cytidine
  modified_base 18: mod_base = OTHER; note = DNA nucleotide carrying a 6-amino-5-nitro-3-yl-2(1H)-pyridone nucleobase
  modified_base 19: mod_base = OTHER; note = DNA nucleotide carrying a hypoxanthine nucleobase
  modified_base order(5,9,11,16,21,23..24,27): mod_base = OTHER; note = 2-Prime-Fluoro modified nucleoside
  modified_base order(1..4,6..8,10,12..15,20,22,25..26,28..29): mod_base = OTHER; note = 2-Prime-O-Methyl modified nucleoside
  modified_base order(1^2,28^29): mod_base = OTHER; note = (1,3-dimethylimidazolidin-2-ylidene) Phosphoramidate linkage
  modified_base order(2..19,20..28): mod_base = OTHER; note = Phosphorothioate linkage
  modified_base 19^20: mod_base = OTHER; note = Methylphosphonate linkage
  misc_feature 1..29: note = RM109305
ggggcatgatgccatacnntgccaccagg

SEQ ID NO: 531 - DNA, 29 bp, synthetic construct
  source 1..29: mol_type = other DNA
  misc_feature 15..16: note = DNA
  misc_feature order(1..14,17..29): note = RNA
  modified_base 14: mod_base = OTHER; note = 2-Prime-O-Methoxyethyl modified 5-methyl Cytidine
  modified_base 15: mod_base = OTHER; note = DNA nucleotide carrying a 6-amino-5-nitro-3-yl-2(1H)-pyridone nucleobase
  modified_base 16: mod_base = OTHER; note = DNA nucleotide carrying a hypoxanthine nucleobase
  modified_base order(2,6,8,13,18,20..21,24): mod_base = OTHER; note = 2-Prime-Fluoro modified nucleoside
  modified_base order(1,3..5,7,9..12,17,19,22..23,25..29): mod_base = OTHER; note = 2-Prime-O-Methyl modified nucleoside
  modified_base order(1^2,28^29): mod_base = OTHER; note = (1,3-dimethylimidazolidin-2-ylidene) Phosphoramidate linkage
  modified_base order(2..16,17..28): mod_base = OTHER; note = Phosphorothioate linkage
  modified_base 16^17: mod_base = OTHER; note = Methylphosphonate linkage
  misc_feature 1..29: note = RM109306
gcatgatgccatacnntgccaccagggcg

SEQ ID NO: 532 - DNA, 29 bp, synthetic construct
  source 1..29: mol_type = other DNA
  misc_feature 12..13: note = DNA
  misc_feature order(1..11,14..29): note = RNA
  modified_base 11: mod_base = OTHER; note = 2-Prime-O-Methoxyethyl modified 5-methyl Cytidine
  modified_base 12: mod_base = OTHER; note = DNA nucleotide carrying a 6-amino-5-nitro-3-yl-2(1H)-pyridone nucleobase
  modified_base 13: mod_base = OTHER; note = DNA nucleotide carrying a hypoxanthine nucleobase
  modified_base order(5,8..9,15..16,21,23,27): mod_base = OTHER; note = 2-Prime-Fluoro modified nucleoside
  modified_base order(1..4,6..7,10,14,17..20,22,24..26,28..29): mod_base = OTHER; note = 2-Prime-O-Methyl modified nucleoside
  modified_base order(1^2,28^29): mod_base = OTHER; note = (1,3-dimethylimidazolidin-2-ylidene) Phosphoramidate linkage
  modified_base order(2..13,14..28): mod_base = OTHER; note = Phosphorothioate linkage
  modified_base 13^14: mod_base = OTHER; note = Methylphosphonate linkage
  misc_feature 1..29: note = RM109307
tgatgccatacnntgccaccagggcgatg

SEQ ID NO: 533 - DNA, 29 bp, synthetic construct
  source 1..29: mol_type = other DNA
  misc_feature 9..10: note = DNA
  misc_feature order(1..8,11..29): note = RNA
  modified_base 8: mod_base = OTHER; note = 2-Prime-O-Methoxyethyl modified 5-methyl Cytidine
  modified_base 9: mod_base = OTHER; note = DNA nucleotide carrying a 6-amino-5-nitro-3-yl-2(1H)-pyridone nucleobase
  modified_base 10: mod_base = OTHER; note = DNA nucleotide carrying a hypoxanthine nucleobase
  modified_base order(2,5..6,12..13,18,20,24): mod_base = OTHER; note = 2-Prime-Fluoro modified nucleoside
  modified_base order(1,3..4,7,11,14..17,19,21..23,25..29): mod_base = OTHER; note = 2-Prime-O-Methyl modified nucleoside
  modified_base order(1^2,28^29): mod_base = OTHER; note = (1,3-dimethylimidazolidin-2-ylidene) Phosphoramidate linkage
  modified_base order(2..10,11..28): mod_base = OTHER; note = Phosphorothioate linkage
  modified_base 10^11: mod_base = OTHER; note = Methylphosphonate linkage
  misc_feature 1..29: note = RM109308
tgccatacnntgccaccagggcgatggcc

SEQ ID NO: 534 - DNA, 26 bp, synthetic construct
  source 1..26: mol_type = other DNA
  misc_feature 22..23: note = DNA
  misc_feature order(1..21,24..26): note = RNA
  modified_base 21: mod_base = OTHER; note = 2-Prime-O-Methoxyethyl modified 5-methyl Cytidine
  modified_base 22: mod_base = OTHER; note = DNA nucleotide carrying a 6-amino-5-nitro-3-yl-2(1H)-pyridone nucleobase
  modified_base 23: mod_base = OTHER; note = DNA nucleotide carrying a hypoxanthine nucleobase
  modified_base order(9,13,15,20,25): mod_base = OTHER; note = 2-Prime-Fluoro modified nucleoside
  modified_base order(1..8,10..12,14,16..19,24,26): mod_base = OTHER; note = 2-Prime-O-Methyl modified nucleoside
  modified_base order(1^2,25^26): mod_base = OTHER; note = (1,3-dimethylimidazolidin-2-ylidene) Phosphoramidate linkage
  modified_base order(2..23,24^25): mod_base = OTHER; note = Phosphorothioate linkage
  modified_base 23^24: mod_base = OTHER; note = Methylphosphonate linkage
  misc_feature 1..26: note = RM109309
gtgaggggcatgatgccatacnntgc

SEQ ID NO: 535 - DNA, 26 bp, synthetic construct
  source 1..26: mol_type = other DNA
  misc_feature 19..20: note = DNA
  misc_feature order(1..18,21..26): note = RNA
  modified_base 18: mod_base = OTHER; note = 2-Prime-O-Methoxyethyl modified 5-methyl Cytidine
  modified_base 19: mod_base = OTHER; note = DNA nucleotide carrying a 6-amino-5-nitro-3-yl-2(1H)-pyridone nucleobase
  modified_base 20: mod_base = OTHER; note = DNA nucleotide carrying a hypoxanthine nucleobase
  modified_base order(6,10,12,17,22): mod_base = OTHER; note = 2-Prime-Fluoro modified nucleoside
  modified_base order(1..5,7..9,11,13..16,21,23..26): mod_base = OTHER; note = 2-Prime-O-Methyl modified nucleoside
  modified_base order(1^2,25^26): mod_base = OTHER; note = (1,3-dimethylimidazolidin-2-ylidene) Phosphoramidate linkage
  modified_base order(2..20,21..25): mod_base = OTHER; note = Phosphorothioate linkage
  modified_base 20^21: mod_base = OTHER; note = Methylphosphonate linkage
  misc_feature 1..26: note = RM109310
aggggcatgatgccatacnntgccac

SEQ ID NO: 536 - DNA, 26 bp, synthetic construct
  source 1..26: mol_type = other DNA
  misc_feature 16..17: note = DNA
  misc_feature order(1..15,18..26): note = RNA
  modified_base 15: mod_base = OTHER; note = 2-Prime-O-Methoxyethyl modified 5-methyl Cytidine
  modified_base 16: mod_base = OTHER; note = DNA nucleotide carrying a 6-amino-5-nitro-3-yl-2(1H)-pyridone nucleobase
  modified_base 17: mod_base = OTHER; note = DNA nucleotide carrying a hypoxanthine nucleobase
  modified_base order(3,7,9,14,19): mod_base = OTHER; note = 2-Prime-Fluoro modified nucleoside
  modified_base order(1..2,4..6,8,10..13,18,20..26): mod_base = OTHER; note = 2-Prime-O-Methyl modified nucleoside
  modified_base order(1^2,25^26): mod_base = OTHER; note = (1,3-dimethylimidazolidin-2-ylidene) Phosphoramidate linkage
  modified_base order(2..17,18..25): mod_base = OTHER; note = Phosphorothioate linkage
  modified_base 17^18: mod_base = OTHER; note = Methylphosphonate linkage
  misc_feature 1..26: note = RM109311
ggcatgatgccatacnntgccaccag

SEQ ID NO: 537 - DNA, 29 bp, synthetic construct
  source 1..29: mol_type = other DNA
  misc_feature 24..25: note = DNA
  misc_feature order(1..23,26..29): note = RNA
  modified_base 23: mod_base = OTHER; note = 2-Prime-O-Methoxyethyl modified 5-methyl Cytidine
  modified_base 24: mod_base = OTHER; note = DNA nucleotide carrying a 6-amino-5-nitro-3-yl-2(1H)-pyridone nucleobase
  modified_base 25: mod_base = OTHER; note = DNA nucleotide carrying a hypoxanthine nucleobase
  modified_base order(11,15,17,22,27): mod_base = OTHER; note = 2-Prime-Fluoro modified nucleoside
  modified_base order(1..10,12..14,16,18..21,26,28..29): mod_base = OTHER; note = 2-Prime-O-Methyl modified nucleoside
  modified_base order(1^2,28^29): mod_base = OTHER; note = (1,3-dimethylimidazolidin-2-ylidene) Phosphoramidate linkage
  modified_base order(2..25,26..28): mod_base = OTHER; note = Phosphorothioate linkage
  modified_base 25^26: mod_base = OTHER; note = Methylphosphonate linkage
  misc_feature 1..29: note = RM109312
ccgtgaggggcatgatgccatacnntgcc

SEQ ID NO: 538 - DNA, 29 bp, synthetic construct
  source 1..29: mol_type = other DNA
  misc_feature 21..22: note = DNA
  misc_feature order(1..20,23..29): note = RNA
  modified_base 20: mod_base = OTHER; note = 2-Prime-O-Methoxyethyl modified 5-methyl Cytidine
  modified_base 21: mod_base = OTHER; note = DNA nucleotide carrying a 6-amino-5-nitro-3-yl-2(1H)-pyridone nucleobase
  modified_base 22: mod_base = OTHER; note = DNA nucleotide carrying a hypoxanthine nucleobase
  modified_base order(8,12,14,19,24): mod_base = OTHER; note = 2-Prime-Fluoro modified nucleoside
  modified_base order(1..7,9..11,13,15..18,23,25..29): mod_base = OTHER; note = 2-Prime-O-Methyl modified nucleoside
  modified_base order(1^2,28^29): mod_base = OTHER; note = (1,3-dimethylimidazolidin-2-ylidene) Phosphoramidate linkage
  modified_base order(2..22,23..28): mod_base = OTHER; note = Phosphorothioate linkage
  modified_base 22^23: mod_base = OTHER; note = Methylphosphonate linkage
  misc_feature 1..29: note = RM109313
tgaggggcatgatgccatacnntgccacc

SEQ ID NO: 539 - DNA, 29 bp, synthetic construct
  source 1..29: mol_type = other DNA
  misc_feature 18..19: note = DNA
  misc_feature order(1..17,20..29): note = RNA
  modified_base 17: mod_base = OTHER; note = 2-Prime-O-Methoxyethyl modified 5-methyl Cytidine
  modified_base 18: mod_base = OTHER; note = DNA nucleotide carrying a 6-amino-5-nitro-3-yl-2(1H)-pyridone nucleobase
  modified_base 19: mod_base = OTHER; note = DNA nucleotide carrying a hypoxanthine nucleobase
  modified_base order(5,9,11,16,21): mod_base = OTHER; note = 2-Prime-Fluoro modified nucleoside
  modified_base order(1..4,6..8,10,12..15,20,22..29): mod_base = OTHER; note = 2-Prime-O-Methyl modified nucleoside
  modified_base order(1^2,28^29): mod_base = OTHER; note = (1,3-dimethylimidazolidin-2-ylidene) Phosphoramidate linkage
  modified_base order(2..19,20..28): mod_base = OTHER; note = Phosphorothioate linkage
  modified_base 19^20: mod_base = OTHER; note = Methylphosphonate linkage
  misc_feature 1..29: note = RM109314
ggggcatgatgccatacnntgccaccagg

SEQ ID NO: 540 - DNA, 29 bp, synthetic construct
  source 1..29: mol_type = other DNA
  misc_feature 15..16: note = DNA
  misc_feature order(1..14,17..29): note = RNA
  modified_base 14: mod_base = OTHER; note = 2-Prime-O-Methoxyethyl modified 5-methyl Cytidine
  modified_base 15: mod_base = OTHER; note = DNA nucleotide carrying a 6-amino-5-nitro-3-yl-2(1H)-pyridone nucleobase
  modified_base 16: mod_base = OTHER; note = DNA nucleotide carrying a hypoxanthine nucleobase
  modified_base order(2,6,8,13,18): mod_base = OTHER; note = 2-Prime-Fluoro modified nucleoside
  modified_base order(1,3..5,7,9..12,17,19..29): mod_base = OTHER; note = 2-Prime-O-Methyl modified nucleoside
  modified_base order(1^2,28^29): mod_base = OTHER; note = (1,3-dimethylimidazolidin-2-ylidene) Phosphoramidate linkage
  modified_base order(2..16,17..28): mod_base = OTHER; note = Phosphorothioate linkage
  modified_base 16^17: mod_base = OTHER; note = Methylphosphonate linkage
  misc_feature 1..29: note = RM109315
gcatgatgccatacnntgccaccagggcg

SEQ ID NO: 541 - DNA, 29 bp, synthetic construct
  source 1..29: mol_type = other DNA
  misc_feature 9..10: note = DNA
  misc_feature order(1..8,11..29): note = RNA
  modified_base 8: mod_base = OTHER; note = 2-Prime-O-Methoxyethyl modified 5-methyl Cytidine
  modified_base 9: mod_base = OTHER; note = DNA nucleotide carrying a 6-amino-5-nitro-3-yl-2(1H)-pyridone nucleobase
  modified_base 10: mod_base = OTHER; note = DNA nucleotide carrying a hypoxanthine nucleobase
  modified_base order(3,12,15,17,19,26..27,29): mod_base = OTHER; note = 2-Prime-Fluoro modified nucleoside
  modified_base order(1..2,4..7,11,13..14,16,18,20..25,28): mod_base = OTHER; note = 2-Prime-O-Methyl modified nucleoside
  modified_base order(1^2,28^29): mod_base = OTHER; note = (1,3-dimethylimidazolidin-2-ylidene) Phosphoramidate linkage
  modified_base order(2..10,11..28): mod_base = OTHER; note = Phosphorothioate linkage
  modified_base 10^11: mod_base = OTHER; note = Methylphosphonate linkage
  misc_feature 1..29: note = RM109316
tgccatacnntgccaccagggcgatggcc

SEQ ID NO: 542 - DNA, 29 bp, synthetic construct
  source 1..29: mol_type = other DNA
  misc_feature 21..22: note = DNA
  misc_feature order(1..20,23..29): note = RNA
  modified_base 20: mod_base = OTHER; note = 2-Prime-O-Methoxyethyl modified 5-methyl Cytidine
  modified_base 21: mod_base = OTHER; note = DNA nucleotide carrying a 6-amino-5-nitro-3-yl-2(1H)-pyridone nucleobase
  modified_base 22: mod_base = OTHER; note = DNA nucleotide carrying a hypoxanthine nucleobase
  modified_base order(3,5..6,13,15,17,24,29): mod_base = OTHER; note = 2-Prime-Fluoro modified nucleoside
  modified_base order(1..2,4,7..12,14,16,18..19,23,25..28): mod_base = OTHER; note = 2-Prime-O-Methyl modified nucleoside
  modified_base order(1^2,28^29): mod_base = OTHER; note = (1,3-dimethylimidazolidin-2-ylidene) Phosphoramidate linkage
  modified_base order(2..22,23..28): mod_base = OTHER; note = Phosphorothioate linkage
  modified_base 22^23: mod_base = OTHER; note = Methylphosphonate linkage
  misc_feature 1..29: note = RM109317
tgaggggcatgatgccatacnntgccacc

SEQ ID NO: 543 - DNA, 26 bp, synthetic construct
  source 1..26: mol_type = other DNA
  misc_feature 16..17: note = DNA
  misc_feature order(1..15,18..26): note = RNA
  modified_base 15: mod_base = OTHER; note = 2-Prime-O-Methoxyethyl modified 5-methyl Cytidine
  modified_base 16: mod_base = OTHER; note = DNA nucleotide carrying a 6-amino-5-nitro-3-yl-2(1H)-pyridone nucleobase
  modified_base 17: mod_base = OTHER; note = DNA nucleotide carrying a hypoxanthine nucleobase
  modified_base order(10,19,22,24,26): mod_base = OTHER; note = 2-Prime-Fluoro modified nucleoside
  modified_base order(1..9,11..14,18,20..21,23,25): mod_base = OTHER; note = 2-Prime-O-Methyl modified nucleoside
  modified_base order(1^2,25^26): mod_base = OTHER; note = (1,3-dimethylimidazolidin-2-ylidene) Phosphoramidate linkage
  modified_base order(2..17,18..25): mod_base = OTHER; note = Phosphorothioate linkage
  modified_base 17^18: mod_base = OTHER; note = Methylphosphonate linkage
  misc_feature 1..26: note = RM109318
ggcatgatgccatacnntgccaccag

SEQ ID NO: 544 - DNA, 26 bp, synthetic construct
  source 1..26: mol_type = other DNA
  misc_feature 13..14: note = DNA
  misc_feature order(1..12,15..26): note = RNA
  modified_base 12: mod_base = OTHER; note = 2-Prime-O-Methoxyethyl modified 5-methyl Cytidine
  modified_base 13: mod_base = OTHER; note = DNA nucleotide carrying a 6-amino-5-nitro-3-yl-2(1H)-pyridone nucleobase
  modified_base 14: mod_base = OTHER; note = DNA nucleotide carrying a hypoxanthine nucleobase
  modified_base order(7,16,19,21,23): mod_base = OTHER; note = 2-Prime-Fluoro modified nucleoside
  modified_base order(1..6,8..11,15,17..18,20,22,24..26): mod_base = OTHER; note = 2-Prime-O-Methyl modified nucleoside
  modified_base order(1^2,25^26): mod_base = OTHER; note = (1,3-dimethylimidazolidin-2-ylidene) Phosphoramidate linkage
  modified_base order(2..14,15..25): mod_base = OTHER; note = Phosphorothioate linkage
  modified_base 14^15: mod_base = OTHER; note = Methylphosphonate linkage
  misc_feature 1..26: note = RM109319
atgatgccatacnntgccaccagggc

SEQ ID NO: 545 - DNA, 26 bp, synthetic construct
  source 1..26: mol_type = other DNA
  misc_feature 10..11: note = DNA
  misc_feature order(1..9,12..26): note = RNA
  modified_base 9: mod_base = OTHER; note = 2-Prime-O-Methoxyethyl modified 5-methyl Cytidine
  modified_base 10: mod_base = OTHER; note = DNA nucleotide carrying a 6-amino-5-nitro-3-yl-2(1H)-pyridone nucleobase
  modified_base 11: mod_base = OTHER; note = DNA nucleotide carrying a hypoxanthine nucleobase
  modified_base order(4,13,16,18,20): mod_base = OTHER; note = 2-Prime-Fluoro modified nucleoside
  modified_base order(1..3,5..8,12,14..15,17,19,21..26): mod_base = OTHER; note = 2-Prime-O-Methyl modified nucleoside
  modified_base order(1^2,25^26): mod_base = OTHER; note = (1,3-dimethylimidazolidin-2-ylidene) Phosphoramidate linkage
  modified_base order(2..11,12..25): mod_base = OTHER; note = Phosphorothioate linkage
  modified_base 11^12: mod_base = OTHER; note = Methylphosphonate linkage
  misc_feature 1..26: note = RM109320
atgccatacnntgccaccagggcgat

SEQ ID NO: 546 - DNA, 26 bp, synthetic construct
  source 1..26: mol_type = other DNA
  misc_feature 7..8: note = DNA
  misc_feature order(1..6,9..26): note = RNA
  modified_base 6: mod_base = OTHER; note = 2-Prime-O-Methoxyethyl modified 5-methyl Cytidine
  modified_base 7: mod_base = OTHER; note = DNA nucleotide carrying a 6-amino-5-nitro-3-yl-2(1H)-pyridone nucleobase
  modified_base 8: mod_base = OTHER; note = DNA nucleotide carrying a hypoxanthine nucleobase
  modified_base order(1,10,13,15,17): mod_base = OTHER; note = 2-Prime-Fluoro modified nucleoside
  modified_base order(2..5,9,11..12,14,16,18..26): mod_base = OTHER; note = 2-Prime-O-Methyl modified nucleoside
  modified_base order(1^2,25^26): mod_base = OTHER; note = (1,3-dimethylimidazolidin-2-ylidene) Phosphoramidate linkage
  modified_base order(2..8,9..25): mod_base = OTHER; note = Phosphorothioate linkage
  modified_base 8^9: mod_base = OTHER; note = Methylphosphonate linkage
  misc_feature 1..26: note = RM109321
ccatacnntgccaccagggcgatggc

SEQ ID NO: 547 - DNA, 29 bp, synthetic construct
  source 1..29: mol_type = other DNA
  misc_feature 18..19: note = DNA
  misc_feature order(1..17,20..29): note = RNA
  modified_base 17: mod_base = OTHER; note = 2-Prime-O-Methoxyethyl modified 5-methyl Cytidine
  modified_base 18: mod_base = OTHER; note = DNA nucleotide carrying a 6-amino-5-nitro-3-yl-2(1H)-pyridone nucleobase
  modified_base 19: mod_base = OTHER; note = DNA nucleotide carrying a hypoxanthine nucleobase
  modified_base order(12,21,24,26,28): mod_base = OTHER; note = 2-Prime-Fluoro modified nucleoside
  modified_base order(1..11,13..16,20,22..23,25,27,29): mod_base = OTHER; note = 2-Prime-O-Methyl modified nucleoside
  modified_base order(1^2,28^29): mod_base = OTHER; note = (1,3-dimethylimidazolidin-2-ylidene) Phosphoramidate linkage
  modified_base order(2..19,20..28): mod_base = OTHER; note = Phosphorothioate linkage
  modified_base 19^20: mod_base = OTHER; note = Methylphosphonate linkage
  misc_feature 1..29: note = RM109322
ggggcatgatgccatacnntgccaccagg

SEQ ID NO: 548 - DNA, 29 bp, synthetic construct
  source 1..29: mol_type = other DNA
  misc_feature 15..16: note = DNA
  misc_feature order(1..14,17..29): note = RNA
  modified_base 14: mod_base = OTHER; note = 2-Prime-O-Methoxyethyl modified 5-methyl Cytidine
  modified_base 15: mod_base = OTHER; note = DNA nucleotide carrying a 6-amino-5-nitro-3-yl-2(1H)-pyridone nucleobase
  modified_base 16: mod_base = OTHER; note = DNA nucleotide carrying a hypoxanthine nucleobase
  modified_base order(9,18,21,23,25): mod_base = OTHER; note = 2-Prime-Fluoro modified nucleoside
  modified_base order(1..8,10..13,17,19..20,22,24,26..29): mod_base = OTHER; note = 2-Prime-O-Methyl modified nucleoside
  modified_base order(1^2,28^29): mod_base = OTHER; note = (1,3-dimethylimidazolidin-2-ylidene) Phosphoramidate linkage
  modified_base order(2..16,17..28): mod_base = OTHER; note = Phosphorothioate linkage
  modified_base 16^17: mod_base = OTHER; note = Methylphosphonate linkage
  misc_feature 1..29: note = RM109323
gcatgatgccatacnntgccaccagggcg

SEQ ID NO: 549 - DNA, 29 bp, synthetic construct
  source 1..29: mol_type = other DNA
  misc_feature 12..13: note = DNA
  misc_feature order(1..11,14..29): note = RNA
  modified_base 11: mod_base = OTHER; note = 2-Prime-O-Methoxyethyl modified 5-methyl Cytidine
  modified_base 12: mod_base = OTHER; note = DNA nucleotide carrying a 6-amino-5-nitro-3-yl-2(1H)-pyridone nucleobase
  modified_base 13: mod_base = OTHER; note = DNA nucleotide carrying a hypoxanthine nucleobase
  modified_base order(6,15,18,20,22): mod_base = OTHER; note = 2-Prime-Fluoro modified nucleoside
  modified_base order(1..5,7..10,14,16..17,19,21,23..29): mod_base = OTHER; note = 2-Prime-O-Methyl modified nucleoside
  modified_base order(1^2,28^29): mod_base = OTHER; note = (1,3-dimethylimidazolidin-2-ylidene) Phosphoramidate linkage
  modified_base order(2..13,14..28): mod_base = OTHER; note = Phosphorothioate linkage
  modified_base 13^14: mod_base = OTHER; note = Methylphosphonate linkage
  misc_feature 1..29: note = RM109324
tgatgccatacnntgccaccagggcgatg

SEQ ID NO: 550 - DNA, 29 bp, synthetic construct
  source 1..29: mol_type = other DNA
  misc_feature 9..10: note = DNA
  misc_feature order(1..8,11..29): note = RNA
  modified_base 8: mod_base = OTHER; note = 2-Prime-O-Methoxyethyl modified 5-methyl Cytidine
  modified_base 9: mod_base = OTHER; note = DNA nucleotide carrying a 6-amino-5-nitro-3-yl-2(1H)-pyridone nucleobase
  modified_base 10: mod_base = OTHER; note = DNA nucleotide carrying a hypoxanthine nucleobase
  modified_base order(3,12,15,17,19): mod_base = OTHER; note = 2-Prime-Fluoro modified nucleoside
  modified_base order(1..2,4..7,11,13..14,16,18,20..29): mod_base = OTHER; note = 2-Prime-O-Methyl modified nucleoside
  modified_base order(1^2,28^29): mod_base = OTHER; note = (1,3-dimethylimidazolidin-2-ylidene) Phosphoramidate linkage
  modified_base order(2..10,11..28): mod_base = OTHER; note = Phosphorothioate linkage
  modified_base 10^11: mod_base = OTHER; note = Methylphosphonate linkage
  misc_feature 1..29: note = RM109325
tgccatacnntgccaccagggcgatggcc

SEQ ID NO: 551 - DNA, 26 bp, synthetic construct
  source 1..26: mol_type = other DNA
  misc_feature 16..17: note = DNA
  misc_feature order(1..15,18..26): note = RNA
  modified_base 15: mod_base = OTHER; note = 2-Prime-O-Methoxyethyl modified 5-methyl Cytidine
  modified_base 16: mod_base = OTHER; note = DNA nucleotide carrying a 6-amino-5-nitro-3-yl-2(1H)-pyridone nucleobase
  modified_base 17: mod_base = OTHER; note = DNA nucleotide carrying a hypoxanthine nucleobase
  modified_base order(8,10,12,19,24): mod_base = OTHER; note = 2-Prime-Fluoro modified nucleoside
  modified_base order(1..7,9,11,13..14,18,20..23,25..26): mod_base = OTHER; note = 2-Prime-O-Methyl modified nucleoside
  modified_base order(1^2,25^26): mod_base = OTHER; note = (1,3-dimethylimidazolidin-2-ylidene) Phosphoramidate linkage
  modified_base order(2..17,18..25): mod_base = OTHER; note = Phosphorothioate linkage
  modified_base 17^18: mod_base = OTHER; note = Methylphosphonate linkage
  misc_feature 1..26: note = RM109326
ggcatgatgccatacnntgccaccag

SEQ ID NO: 552 - DNA, 26 bp, synthetic construct
  source 1..26: mol_type = other DNA
  misc_feature 13..14: note = DNA
  misc_feature order(1..12,15..26): note = RNA
  modified_base 12: mod_base = OTHER; note = 2-Prime-O-Methoxyethyl modified 5-methyl Cytidine
  modified_base 13: mod_base = OTHER; note = DNA nucleotide carrying a 6-amino-5-nitro-3-yl-2(1H)-pyridone nucleobase
  modified_base 14: mod_base = OTHER; note = DNA nucleotide carrying a hypoxanthine nucleobase
  modified_base order(5,7,9,16,21): mod_base = OTHER; note = 2-Prime-Fluoro modified nucleoside
  modified_base order(1..4,6,8,10..11,15,17..20,22..26): mod_base = OTHER; note = 2-Prime-O-Methyl modified nucleoside
  modified_base order(1^2,25^26): mod_base = OTHER; note = (1,3-dimethylimidazolidin-2-ylidene) Phosphoramidate linkage
  modified_base order(2..14,15..25): mod_base = OTHER; note = Phosphorothioate linkage
  modified_base 14^15: mod_base = OTHER; note = Methylphosphonate linkage
  misc_feature 1..26: note = RM109327
atgatgccatacnntgccaccagggc

SEQ ID NO: 553 - DNA, 26 bp, synthetic construct
  source 1..26: mol_type = other DNA
  misc_feature 10..11: note = DNA
  misc_feature order(1..9,12..26): note = RNA
  modified_base 9: mod_base = OTHER; note = 2-Prime-O-Methoxyethyl modified 5-methyl Cytidine
  modified_base 10: mod_base = OTHER; note = DNA nucleotide carrying a 6-amino-5-nitro-3-yl-2(1H)-pyridone nucleobase
  modified_base 11: mod_base = OTHER; note = DNA nucleotide carrying a hypoxanthine nucleobase
  modified_base order(2,4,6,13,18): mod_base = OTHER; note = 2-Prime-Fluoro modified nucleoside
  modified_base order(1,3,5,7..8,12,14..17,19..26): mod_base = OTHER; note = 2-Prime-O-Methyl modified nucleoside
  modified_base order(1^2,25^26): mod_base = OTHER; note = (1,3-dimethylimidazolidin-2-ylidene) Phosphoramidate linkage
  modified_base order(2..11,12..25): mod_base = OTHER; note = Phosphorothioate linkage
  modified_base 11^12: mod_base = OTHER; note = Methylphosphonate linkage
  misc_feature 1..26: note = RM109328
atgccatacnntgccaccagggcgat

SEQ ID NO: 554 - DNA, 29 bp, synthetic construct
  source 1..29: mol_type = other DNA
  misc_feature 21..22: note = DNA
  misc_feature order(1..20,23..29): note = RNA
  modified_base 20: mod_base = OTHER; note = 2-Prime-O-Methoxyethyl modified 5-methyl Cytidine
  modified_base 21: mod_base = OTHER; note = DNA nucleotide carrying a 6-amino-5-nitro-3-yl-2(1H)-pyridone nucleobase
  modified_base 22: mod_base = OTHER; note = DNA nucleotide carrying a hypoxanthine nucleobase
  modified_base order(13,15,17,24,29): mod_base = OTHER; note = 2-Prime-Fluoro modified nucleoside
  modified_base order(1..12,14,16,18..19,23,25..28): mod_base = OTHER; note = 2-Prime-O-Methyl modified nucleoside
  modified_base order(1^2,28^29): mod_base = OTHER; note = (1,3-dimethylimidazolidin-2-ylidene) Phosphoramidate linkage
  modified_base order(2..22,23..28): mod_base = OTHER; note = Phosphorothioate linkage
  modified_base 22^23: mod_base = OTHER; note = Methylphosphonate linkage
  misc_feature 1..29: note = RM109329
tgaggggcatgatgccatacnntgccacc

SEQ ID NO: 555 - DNA, 29 bp, synthetic construct
  source 1..29: mol_type = other DNA
  misc_feature 18..19: note = DNA
  misc_feature order(1..17,20..29): note = RNA
  modified_base 17: mod_base = OTHER; note = 2-Prime-O-Methoxyethyl modified 5-methyl Cytidine
  modified_base 18: mod_base = OTHER; note = DNA nucleotide carrying a 6-amino-5-nitro-3-yl-2(1H)-pyridone nucleobase
  modified_base 19: mod_base = OTHER; note = DNA nucleotide carrying a hypoxanthine nucleobase
  modified_base order(10,12,14,21,26): mod_base = OTHER; note = 2-Prime-Fluoro modified nucleoside
  modified_base order(1..9,11,13,15..16,20,22..25,27..29): mod_base = OTHER; note = 2-Prime-O-Methyl modified nucleoside
  modified_base order(1^2,28^29): mod_base = OTHER; note = (1,3-dimethylimidazolidin-2-ylidene) Phosphoramidate linkage
  modified_base order(2..19,20..28): mod_base = OTHER; note = Phosphorothioate linkage
  modified_base 19^20: mod_base = OTHER; note = Methylphosphonate linkage
  misc_feature 1..29: note = RM109330
ggggcatgatgccatacnntgccaccagg

SEQ ID NO: 556 - DNA, 29 bp, synthetic construct
  source 1..29: mol_type = other DNA
  misc_feature 15..16: note = DNA
  misc_feature order(1..14,17..29): note = RNA
  modified_base 14: mod_base = OTHER; note = 2-Prime-O-Methoxyethyl modified 5-methyl Cytidine
  modified_base 15: mod_base = OTHER; note = DNA nucleotide carrying a 6-amino-5-nitro-3-yl-2(1H)-pyridone nucleobase
  modified_base 16: mod_base = OTHER; note = DNA nucleotide carrying a hypoxanthine nucleobase
  modified_base order(7,9,11,18,23): mod_base = OTHER; note = 2-Prime-Fluoro modified nucleoside
  modified_base order(1..6,8,10,12..13,17,19..22,24..29): mod_base = OTHER; note = 2-Prime-O-Methyl modified nucleoside
  modified_base order(1^2,28^29): mod_base = OTHER; note = (1,3-dimethylimidazolidin-2-ylidene) Phosphoramidate linkage
  modified_base order(2..16,17..28): mod_base = OTHER; note = Phosphorothioate linkage
  modified_base 16^17: mod_base = OTHER; note = Methylphosphonate linkage
  misc_feature 1..29: note = RM109331
gcatgatgccatacnntgccaccagggcg

SEQ ID NO: 557 - DNA, 29 bp, synthetic construct
  source 1..29: mol_type = other DNA
  misc_feature 12..13: note = DNA
  misc_feature order(1..11,14..29): note = RNA
  modified_base 11: mod_base = OTHER; note = 2-Prime-O-Methoxyethyl modified 5-methyl Cytidine
  modified_base 12: mod_base = OTHER; note = DNA nucleotide carrying a 6-amino-5-nitro-3-yl-2(1H)-pyridone nucleobase
  modified_base 13: mod_base = OTHER; note = DNA nucleotide carrying a hypoxanthine nucleobase
  modified_base order(4,6,8,15,20): mod_base = OTHER; note = 2-Prime-Fluoro modified nucleoside
  modified_base order(1..3,5,7,9..10,14,16..19,21..29): mod_base = OTHER; note = 2-Prime-O-Methyl modified nucleoside
  modified_base order(1^2,28^29): mod_base = OTHER; note = (1,3-dimethylimidazolidin-2-ylidene) Phosphoramidate linkage
  modified_base order(2..13,14..28): mod_base = OTHER; note = Phosphorothioate linkage
  modified_base 13^14: mod_base = OTHER; note = Methylphosphonate linkage
  misc_feature 1..29: note = RM109332
tgatgccatacnntgccaccagggcgatg

SEQ ID NO: 558 - DNA, 29 bp, synthetic construct
  source 1..29: mol_type = other DNA
  misc_feature 9..10: note = DNA
  misc_feature order(1..8,11..29): note = RNA
  modified_base 8: mod_base = OTHER; note = 2-Prime-O-Methoxyethyl modified 5-methyl Cytidine
  modified_base 9: mod_base = OTHER; note = DNA nucleotide carrying a 6-amino-5-nitro-3-yl-2(1H)-pyridone nucleobase
  modified_base 10: mod_base = OTHER; note = DNA nucleotide carrying a hypoxanthine nucleobase
  modified_base order(1,3,5,12,17): mod_base = OTHER; note = 2-Prime-Fluoro modified nucleoside
  modified_base order(2,4,6..7,11,13..16,18..29): mod_base = OTHER; note = 2-Prime-O-Methyl modified nucleoside
  modified_base order(1^2,28^29): mod_base = OTHER; note = (1,3-dimethylimidazolidin-2-ylidene) Phosphoramidate linkage
  modified_base order(2..10,11..28): mod_base = OTHER; note = Phosphorothioate linkage
  modified_base 10^11: mod_base = OTHER; note = Methylphosphonate linkage
  misc_feature 1..29: note = RM109333
tgccatacnntgccaccagggcgatggcc

SEQ ID NO: 559 - DNA, 23 bp, synthetic construct
  source 1..23: mol_type = other DNA
  misc_feature 18..19: note = DNA
  misc_feature order(1..17,20..23): note = RNA
  modified_base 17: mod_base = OTHER; note = 2-Prime-O-Methoxyethyl modified 5-methyl Cytidine
  modified_base 18: mod_base = OTHER; note = DNA nucleotide carrying a 6-amino-5-nitro-3-yl-2(1H)-pyridone nucleobase
  modified_base 19: mod_base = OTHER; note = DNA nucleotide carrying a hypoxanthine nucleobase
  modified_base order(12,21): mod_base = OTHER; note = 2-Prime-Fluoro modified nucleoside
  modified_base order(1..11,13..16,20,22..23): mod_base = OTHER; note = 2-Prime-O-Methyl modified nucleoside
  modified_base order(1^2,22^23): mod_base = OTHER; note = (1,3-dimethylimidazolidin-2-ylidene) Phosphoramidate linkage
  modified_base order(2..19,20..22): mod_base = OTHER; note = Phosphorothioate linkage
  modified_base 19^20: mod_base = OTHER; note = Methylphosphonate linkage
  misc_feature 1..23: note = RM109334
ggggcatgatgccatacnntgcc

SEQ ID NO: 560 - DNA, 23 bp, synthetic construct
  source 1..23: mol_type = other DNA
  misc_feature 15..16: note = DNA
  misc_feature order(1..14,17..23): note = RNA
  modified_base 14: mod_base = OTHER; note = 2-Prime-O-Methoxyethyl modified 5-methyl Cytidine
  modified_base 15: mod_base = OTHER; note = DNA nucleotide carrying a 6-amino-5-nitro-3-yl-2(1H)-pyridone nucleobase
  modified_base 16: mod_base = OTHER; note = DNA nucleotide carrying a hypoxanthine nucleobase
  modified_base order(9,18): mod_base = OTHER; note = 2-Prime-Fluoro modified nucleoside
  modified_base order(1..8,10..13,17,19..23): mod_base = OTHER; note = 2-Prime-O-Methyl modified nucleoside
  modified_base order(1^2,22^23): mod_base = OTHER; note = (1,3-dimethylimidazolidin-2-ylidene) Phosphoramidate linkage
  modified_base order(2..16,17..22): mod_base = OTHER; note = Phosphorothioate linkage
  modified_base 16^17: mod_base = OTHER; note = Methylphosphonate linkage
  misc_feature 1..23: note = RM109335
gcatgatgccatacnntgccacc

SEQ ID NO: 561 - DNA, 23 bp, synthetic construct
  source 1..23: mol_type = other DNA
  misc_feature 12..13: note = DNA
  misc_feature order(1..11,14..23): note = RNA
  modified_base 11: mod_base = OTHER; note = 2-Prime-O-Methoxyethyl modified 5-methyl Cytidine
  modified_base 12: mod_base = OTHER; note = DNA nucleotide carrying a 6-amino-5-nitro-3-yl-2(1H)-pyridone nucleobase
  modified_base 13: mod_base = OTHER; note = DNA nucleotide carrying a hypoxanthine nucleobase
  modified_base order(6,15): mod_base = OTHER; note = 2-Prime-Fluoro modified nucleoside
  modified_base order(1..5,7..10,14,16..23): mod_base = OTHER; note = 2-Prime-O-Methyl modified nucleoside
  modified_base order(1^2,22^23): mod_base = OTHER; note = (1,3-dimethylimidazolidin-2-ylidene) Phosphoramidate linkage
  modified_base order(2..13,14..22): mod_base = OTHER; note = Phosphorothioate linkage
  modified_base 13^14: mod_base = OTHER; note = Methylphosphonate linkage
  misc_feature 1..23: note = RM109336
tgatgccatacnntgccaccagg

SEQ ID NO: 562 - DNA, 23 bp, synthetic construct
  source 1..23: mol_type = other DNA
  misc_feature 9..10: note = DNA
  misc_feature order(1..8,11..23): note = RNA
  modified_base 8: mod_base = OTHER; note = 2-Prime-O-Methoxyethyl modified 5-methyl Cytidine
  modified_base 9: mod_base = OTHER; note = DNA nucleotide carrying a 6-amino-5-nitro-3-yl-2(1H)-pyridone nucleobase
  modified_base 10: mod_base = OTHER; note = DNA nucleotide carrying a hypoxanthine nucleobase
  modified_base order(3,12): mod_base = OTHER; note = 2-Prime-Fluoro modified nucleoside
  modified_base order(1..2,4..7,11,13..23): mod_base = OTHER; note = 2-Prime-O-Methyl modified nucleoside
  modified_base order(1^2,22^23): mod_base = OTHER; note = (1,3-dimethylimidazolidin-2-ylidene) Phosphoramidate linkage
  modified_base order(2..10,11..22): mod_base = OTHER; note = Phosphorothioate linkage
  modified_base 10^11: mod_base = OTHER; note = Methylphosphonate linkage
  misc_feature 1..23: note = RM109337
tgccatacnntgccaccagggcg

SEQ ID NO: 563 - DNA, 26 bp, synthetic construct
  source 1..26: mol_type = other DNA
  misc_feature 22..23: note = DNA
  misc_feature order(1..21,24..26): note = RNA
  modified_base 21: mod_base = OTHER; note = 2-Prime-O-Methoxyethyl modified 5-methyl Cytidine
  modified_base 22: mod_base = OTHER; note = DNA nucleotide carrying a 6-amino-5-nitro-3-yl-2(1H)-pyridone nucleobase
  modified_base 23: mod_base = OTHER; note = DNA nucleotide carrying a hypoxanthine nucleobase
  modified_base order(16,25): mod_base = OTHER; note = 2-Prime-Fluoro modified nucleoside
  modified_base order(1..15,17..20,24,26): mod_base = OTHER; note = 2-Prime-O-Methyl modified nucleoside
  modified_base order(1^2,25^26): mod_base = OTHER; note = (1,3-dimethylimidazolidin-2-ylidene) Phosphoramidate linkage
  modified_base order(2..23,24^25): mod_base = OTHER; note = Phosphorothioate linkage
  modified_base 23^24: mod_base = OTHER; note = Methylphosphonate linkage
  misc_feature 1..26: note = RM109338
gtgaggggcatgatgccatacnntgc

SEQ ID NO: 564 - DNA, 26 bp, synthetic construct
  source 1..26: mol_type = other DNA
  misc_feature 19..20: note = DNA
  misc_feature order(1..18,21..26): note = RNA
  modified_base 18: mod_base = OTHER; note = 2-Prime-O-Methoxyethyl modified 5-methyl Cytidine
  modified_base 19: mod_base = OTHER; note = DNA nucleotide carrying a 6-amino-5-nitro-3-yl-2(1H)-pyridone nucleobase
  modified_base 20: mod_base = OTHER; note = DNA nucleotide carrying a hypoxanthine nucleobase
  modified_base order(13,22): mod_base = OTHER; note = 2-Prime-Fluoro modified nucleoside
  modified_base order(1..12,14..17,21,23..26): mod_base = OTHER; note = 2-Prime-O-Methyl modified nucleoside
  modified_base order(1^2,25^26): mod_base = OTHER; note = (1,3-dimethylimidazolidin-2-ylidene) Phosphoramidate linkage
  modified_base order(2..20,21..25): mod_base = OTHER; note = Phosphorothioate linkage
  modified_base 20^21: mod_base = OTHER; note = Methylphosphonate linkage
  misc_feature 1..26: note = RM109339
aggggcatgatgccatacnntgccac

SEQ ID NO: 565 - DNA, 26 bp, synthetic construct
  source 1..26: mol_type = other DNA
  misc_feature 16..17: note = DNA
  misc_feature order(1..15,18..26): note = RNA
  modified_base 15: mod_base = OTHER; note = 2-Prime-O-Methoxyethyl modified 5-methyl Cytidine
  modified_base 16: mod_base = OTHER; note = DNA nucleotide carrying a 6-amino-5-nitro-3-yl-2(1H)-pyridone nucleobase
  modified_base 17: mod_base = OTHER; note = DNA nucleotide carrying a hypoxanthine nucleobase
  modified_base order(10,19): mod_base = OTHER; note = 2-Prime-Fluoro modified nucleoside
  modified_base order(1..9,11..14,18,20..26): mod_base = OTHER; note = 2-Prime-O-Methyl modified nucleoside
  modified_base order(1^2,25^26): mod_base = OTHER; note = (1,3-dimethylimidazolidin-2-ylidene) Phosphoramidate linkage
  modified_base order(2..17,18..25): mod_base = OTHER; note = Phosphorothioate linkage
  modified_base 17^18: mod_base = OTHER; note = Methylphosphonate linkage
  misc_feature 1..26: note = RM109340
ggcatgatgccatacnntgccaccag

SEQ ID NO: 566 - DNA, 26 bp, synthetic construct
  source 1..26: mol_type = other DNA
  misc_feature 13..14: note = DNA
  misc_feature order(1..12,15..26): note = RNA
  modified_base 12: mod_base = OTHER; note = 2-Prime-O-Methoxyethyl modified 5-methyl Cytidine
  modified_base 13: mod_base = OTHER; note = DNA nucleotide carrying a 6-amino-5-nitro-3-yl-2(1H)-pyridone nucleobase
  modified_base 14: mod_base = OTHER; note = DNA nucleotide carrying a hypoxanthine nucleobase
  modified_base order(7,16): mod_base = OTHER; note = 2-Prime-Fluoro modified nucleoside
  modified_base order(1..6,8..11,15,17..26): mod_base = OTHER; note = 2-Prime-O-Methyl modified nucleoside
  modified_base order(1^2,25^26): mod_base = OTHER; note = (1,3-dimethylimidazolidin-2-ylidene) Phosphoramidate linkage
  modified_base order(2..14,15..25): mod_base = OTHER; note = Phosphorothioate linkage
  modified_base 14^15: mod_base = OTHER; note = Methylphosphonate linkage
  misc_feature 1..26: note = RM109341
atgatgccatacnntgccaccagggc

SEQ ID NO: 567 - DNA, 26 bp, synthetic construct
  source 1..26: mol_type = other DNA
  misc_feature 10..11: note = DNA
  misc_feature order(1..9,12..26): note = RNA
  modified_base 9: mod_base = OTHER; note = 2-Prime-O-Methoxyethyl modified 5-methyl Cytidine
  modified_base 10: mod_base = OTHER; note = DNA nucleotide carrying a 6-amino-5-nitro-3-yl-2(1H)-pyridone nucleobase
  modified_base 11: mod_base = OTHER; note = DNA nucleotide carrying a hypoxanthine nucleobase
  modified_base order(4,13): mod_base = OTHER; note = 2-Prime-Fluoro modified nucleoside
  modified_base order(1..3,5..8,12,14..26): mod_base = OTHER; note = 2-Prime-O-Methyl modified nucleoside
  modified_base order(1^2,25^26): mod_base = OTHER; note = (1,3-dimethylimidazolidin-2-ylidene) Phosphoramidate linkage
  modified_base order(2..11,12..25): mod_base = OTHER; note = Phosphorothioate linkage
  modified_base 11^12: mod_base = OTHER; note = Methylphosphonate linkage
  misc_feature 1..26: note = RM109342
atgccatacnntgccaccagggcgat

SEQ ID NO: 568 - DNA, 26 bp, synthetic construct
  source 1..26: mol_type = other DNA
  misc_feature 7..8: note = DNA
  misc_feature order(1..6,9..26): note = RNA
  modified_base 6: mod_base = OTHER; note = 2-Prime-O-Methoxyethyl modified 5-methyl Cytidine
  modified_base 7: mod_base = OTHER; note = DNA nucleotide carrying a 6-amino-5-nitro-3-yl-2(1H)-pyridone nucleobase
  modified_base 8: mod_base = OTHER; note = DNA nucleotide carrying a hypoxanthine nucleobase
  modified_base order(1,10): mod_base = OTHER; note = 2-Prime-Fluoro modified nucleoside
  modified_base order(2..5,9,11..26): mod_base = OTHER; note = 2-Prime-O-Methyl modified nucleoside
  modified_base order(1^2,25^26): mod_base = OTHER; note = (1,3-dimethylimidazolidin-2-ylidene) Phosphoramidate linkage
  modified_base order(2..8,9..25): mod_base = OTHER; note = Phosphorothioate linkage
  modified_base 8^9: mod_base = OTHER; note = Methylphosphonate linkage
  misc_feature 1..26: note = RM109343
ccatacnntgccaccagggcgatggc

SEQ ID NO: 569 - DNA, 29 bp, synthetic construct
  source 1..29: mol_type = other DNA
  misc_feature 24..25: note = DNA
  misc_feature order(1..23,26..29): note = RNA
  modified_base 23: mod_base = OTHER; note = 2-Prime-O-Methoxyethyl modified 5-methyl Cytidine
  modified_base 24: mod_base = OTHER; note = DNA nucleotide carrying a 6-amino-5-nitro-3-yl-2(1H)-pyridone nucleobase
  modified_base 25: mod_base = OTHER; note = DNA nucleotide carrying a hypoxanthine nucleobase
  modified_base order(18,27): mod_base = OTHER; note = 2-Prime-Fluoro modified nucleoside
  modified_base order(1..17,19..22,26,28..29): mod_base = OTHER; note = 2-Prime-O-Methyl modified nucleoside
  modified_base order(1^2,28^29): mod_base = OTHER; note = (1,3-dimethylimidazolidin-2-ylidene) Phosphoramidate linkage
  modified_base order(2..25,26..28): mod_base = OTHER; note = Phosphorothioate linkage
  modified_base 25^26: mod_base = OTHER; note = Methylphosphonate linkage
  misc_feature 1..29: note = RM109344
ccgtgaggggcatgatgccatacnntgcc

SEQ ID NO: 570 - DNA, 29 bp, synthetic construct
  source 1..29: mol_type = other DNA
  misc_feature 21..22: note = DNA
  misc_feature order(1..20,23..29): note = RNA
  modified_base 20: mod_base = OTHER; note = 2-Prime-O-Methoxyethyl modified 5-methyl Cytidine
  modified_base 21: mod_base = OTHER; note = DNA nucleotide carrying a 6-amino-5-nitro-3-yl-2(1H)-pyridone nucleobase
  modified_base 22: mod_base = OTHER; note = DNA nucleotide carrying a hypoxanthine nucleobase
  modified_base order(15,24): mod_base = OTHER; note = 2-Prime-Fluoro modified nucleoside
  modified_base order(1..14,16..19,23,25..29): mod_base = OTHER; note = 2-Prime-O-Methyl modified nucleoside
  modified_base order(1^2,28^29): mod_base = OTHER; note = (1,3-dimethylimidazolidin-2-ylidene) Phosphoramidate linkage
  modified_base order(2..22,23..28): mod_base = OTHER; note = Phosphorothioate linkage
  modified_base 22^23: mod_base = OTHER; note = Methylphosphonate linkage
  misc_feature 1..29: note = RM109345
tgaggggcatgatgccatacnntgccacc

SEQ ID NO: 571 - DNA, 29 bp, synthetic construct
  source 1..29: mol_type = other DNA
  misc_feature 18..19: note = DNA
  misc_feature order(1..17,20..29): note = RNA
  modified_base 17: mod_base = OTHER; note = 2-Prime-O-Methoxyethyl modified 5-methyl Cytidine
  modified_base 18: mod_base = OTHER; note = DNA nucleotide carrying a 6-amino-5-nitro-3-yl-2(1H)-pyridone nucleobase
  modified_base 19: mod_base = OTHER; note = DNA nucleotide carrying a hypoxanthine nucleobase
  modified_base order(12,21): mod_base = OTHER; note = 2-Prime-Fluoro modified nucleoside
  modified_base order(1..11,13..16,20,22..29): mod_base = OTHER; note = 2-Prime-O-Methyl modified nucleoside
  modified_base order(1^2,28^29): mod_base = OTHER; note = (1,3-dimethylimidazolidin-2-ylidene) Phosphoramidate linkage
  modified_base order(2..19,20..28): mod_base = OTHER; note = Phosphorothioate linkage
  modified_base 19^20: mod_base = OTHER; note = Methylphosphonate linkage
  misc_feature 1..29: note = RM109346
ggggcatgatgccatacnntgccaccagg

SEQ ID NO: 572 - DNA, 29 bp, synthetic construct
  source 1..29: mol_type = other DNA
  misc_feature 15..16: note = DNA
  misc_feature order(1..14,17..29): note = RNA
  modified_base 14: mod_base = OTHER; note = 2-Prime-O-Methoxyethyl modified 5-methyl Cytidine
  modified_base 15: mod_base = OTHER; note = DNA nucleotide carrying a 6-amino-5-nitro-3-yl-2(1H)-pyridone nucleobase
  modified_base 16: mod_base = OTHER; note = DNA nucleotide carrying a hypoxanthine nucleobase
  modified_base order(9,18): mod_base = OTHER; note = 2-Prime-Fluoro modified nucleoside
  modified_base order(1..8,10..13,17,19..29): mod_base = OTHER; note = 2-Prime-O-Methyl modified nucleoside
  modified_base order(1^2,28^29): mod_base = OTHER; note = (1,3-dimethylimidazolidin-2-ylidene) Phosphoramidate linkage
  modified_base order(2..16,17..28): mod_base = OTHER; note = Phosphorothioate linkage
  modified_base 16^17: mod_base = OTHER; note = Methylphosphonate linkage
  misc_feature 1..29: note = RM109347
gcatgatgccatacnntgccaccagggcg

SEQ ID NO: 573 - DNA, 29 bp, synthetic construct
  source 1..29: mol_type = other DNA
  misc_feature 12..13: note = DNA
  misc_feature order(1..11,14..29): note = RNA
  modified_base 11: mod_base = OTHER; note = 2-Prime-O-Methoxyethyl modified 5-methyl Cytidine
  modified_base 12: mod_base = OTHER; note = DNA nucleotide carrying a 6-amino-5-nitro-3-yl-2(1H)-pyridone nucleobase
  modified_base 13: mod_base = OTHER; note = DNA nucleotide carrying a hypoxanthine nucleobase
  modified_base order(6,15): mod_base = OTHER; note = 2-Prime-Fluoro modified nucleoside
  modified_base order(1..5,7..10,14,16..29): mod_base = OTHER; note = 2-Prime-O-Methyl modified nucleoside
  modified_base order(1^2,28^29): mod_base = OTHER; note = (1,3-dimethylimidazolidin-2-ylidene) Phosphoramidate linkage
  modified_base order(2..13,14..28): mod_base = OTHER; note = Phosphorothioate linkage
  modified_base 13^14: mod_base = OTHER; note = Methylphosphonate linkage
  misc_feature 1..29: note = RM109348
tgatgccatacnntgccaccagggcgatg

SEQ ID NO: 574 - DNA, 29 bp, synthetic construct
  source 1..29: mol_type = other DNA
  misc_feature 9..10: note = DNA
  misc_feature order(1..8,11..29): note = RNA
  modified_base 8: mod_base = OTHER; note = 2-Prime-O-Methoxyethyl modified 5-methyl Cytidine
  modified_base 9: mod_base = OTHER; note = DNA nucleotide carrying a 6-amino-5-nitro-3-yl-2(1H)-pyridone nucleobase
  modified_base 10: mod_base = OTHER; note = DNA nucleotide carrying a hypoxanthine nucleobase
  modified_base order(3,12): mod_base = OTHER; note = 2-Prime-Fluoro modified nucleoside
  modified_base order(1..2,4..7,11,13..29): mod_base = OTHER; note = 2-Prime-O-Methyl modified nucleoside
  modified_base order(1^2,28^29): mod_base = OTHER; note = (1,3-dimethylimidazolidin-2-ylidene) Phosphoramidate linkage
  modified_base order(2..10,11..28): mod_base = OTHER; note = Phosphorothioate linkage
  modified_base 10^11: mod_base = OTHER; note = Methylphosphonate linkage
  misc_feature 1..29: note = RM109349
tgccatacnntgccaccagggcgatggcc

SEQ ID NO: 575 - DNA, 32 bp, synthetic construct; identical to SEQ ID NO: 192
  source 1..32: mol_type = other DNA
  misc_feature 7..8: note = DNA
  misc_feature order(1..6,9..32): note = RNA
  modified_base 6: mod_base = OTHER; note = 2-Prime-O-Methoxyethyl modified 5-methyl Cytidine
  modified_base 7: mod_base = OTHER; note = DNA nucleotide carrying a 6-amino-5-nitro-3-yl-2(1H)-pyridone nucleobase
  modified_base 8: mod_base = OTHER; note = DNA nucleotide carrying a hypoxanthine nucleobase
  modified_base order(5,10..11,18,26,31): mod_base = OTHER; note = 2-Prime-Fluoro modified nucleoside
  modified_base order(1..4,9,12..17,19..25,27..30,32): mod_base = OTHER; note = 2-Prime-O-Methyl modified nucleoside
  modified_base order(1^2,31^32): mod_base = OTHER; note = (1,3-dimethylimidazolidin-2-ylidene) Phosphoramidate linkage
  modified_base order(2..8,9..31): mod_base = OTHER; note = Phosphorothioate linkage
  modified_base 8^9: mod_base = OTHER; note = Methylphosphonate linkage
  misc_feature 1..32: note = RM109350

SEQ ID NO: 576 - DNA, 32 bp, synthetic construct; identical to SEQ ID NO: 185
  source 1..32: mol_type = other DNA
  misc_feature 28..29: note = DNA
  misc_feature order(1..27,30..32): note = RNA
  modified_base 27: mod_base = OTHER; note = 2-Prime-O-Methoxyethyl modified 5-methyl Cytidine
  modified_base 28: mod_base = OTHER; note = DNA nucleotide carrying a 6-amino-5-nitro-3-yl-2(1H)-pyridone nucleobase
  modified_base 29: mod_base = OTHER; note = DNA nucleotide carrying a hypoxanthine nucleobase
  modified_base order(6,11,19,26,31..32): mod_base = OTHER; note = 2-Prime-Fluoro modified nucleoside
  modified_base order(1..5,7..10,12..18,20..25,30): mod_base = OTHER; note = 2-Prime-O-Methyl modified nucleoside
  modified_base order(1^2,31^32): mod_base = OTHER; note = (1,3-dimethylimidazolidin-2-ylidene) Phosphoramidate linkage
  modified_base order(2..29,30^31): mod_base = OTHER; note = Phosphorothioate linkage
  modified_base 29^30: mod_base = OTHER; note = Methylphosphonate linkage
  misc_feature 1..32: note = RM109351

SEQ ID NO: 577 - DNA, 32 bp, synthetic construct; identical to SEQ ID NO: 186
  source 1..32: mol_type = other DNA
  misc_feature 25..26: note = DNA
  misc_feature order(1..24,27..32): note = RNA
  modified_base 24: mod_base = OTHER; note = 2-Prime-O-Methoxyethyl modified 5-methyl Cytidine
  modified_base 25: mod_base = OTHER; note = DNA nucleotide carrying a 6-amino-5-nitro-3-yl-2(1H)-pyridone nucleobase
  modified_base 26: mod_base = OTHER; note = DNA nucleotide carrying a hypoxanthine nucleobase
  modified_base order(3,8,16,23,28..29): mod_base = OTHER; note = 2-Prime-Fluoro modified nucleoside
  modified_base order(1..2,4..7,9..15,17..22,27,30..32): mod_base = OTHER; note = 2-Prime-O-Methyl modified nucleoside
  modified_base order(1^2,31^32): mod_base = OTHER; note = (1,3-dimethylimidazolidin-2-ylidene) Phosphoramidate linkage
  modified_base order(2..26,27..31): mod_base = OTHER; note = Phosphorothioate linkage
  modified_base 26^27: mod_base = OTHER; note = Methylphosphonate linkage
  misc_feature 1..32: note = RM109352

SEQ ID NO: 578 - DNA, 23 bp, synthetic construct
  source 1..23: mol_type = other DNA
  misc_feature 12..13: note = DNA
  misc_feature order(1..11,14..23): note = RNA
  modified_base 11: mod_base = OTHER; note = 2-Prime-O-Methoxyethyl modified 5-methyl Cytidine
  modified_base 12: mod_base = OTHER; note = DNA nucleotide carrying a 6-amino-5-nitro-3-yl-2(1H)-pyridone nucleobase
  modified_base 13: mod_base = OTHER; note = DNA nucleotide carrying a hypoxanthine nucleobase
  modified_base order(10,15..16,23): mod_base = OTHER; note = 2-Prime-Fluoro modified nucleoside
  modified_base order(1..9,14,17..22): mod_base = OTHER; note = 2-Prime-O-Methyl modified nucleoside
  modified_base order(1^2,22^23): mod_base = OTHER; note = (1,3-dimethylimidazolidin-2-ylidene) Phosphoramidate linkage
  modified_base order(2..13,14..22): mod_base = OTHER; note = Phosphorothioate linkage
  modified_base 13^14: mod_base = OTHER; note = Methylphosphonate linkage
  misc_feature 1..23: note = RM109353
tgatgccatacnntgccaccagg

SEQ ID NO: 579 - DNA, 23 bp, synthetic construct
  source 1..23: mol_type = other DNA
  misc_feature 9..10: note = DNA
  misc_feature order(1..8,11..23): note = RNA
  modified_base 8: mod_base = OTHER; note = 2-Prime-O-Methoxyethyl modified 5-methyl Cytidine
  modified_base 9: mod_base = OTHER; note = DNA nucleotide carrying a 6-amino-5-nitro-3-yl-2(1H)-pyridone nucleobase
  modified_base 10: mod_base = OTHER; note = DNA nucleotide carrying a hypoxanthine nucleobase
  modified_base order(7,12..13,20): mod_base = OTHER; note = 2-Prime-Fluoro modified nucleoside
  modified_base order(1..6,11,14..19,21..23): mod_base = OTHER; note = 2-Prime-O-Methyl modified nucleoside
  modified_base order(1^2,22^23): mod_base = OTHER; note = (1,3-dimethylimidazolidin-2-ylidene) Phosphoramidate linkage
  modified_base order(2..10,11..22): mod_base = OTHER; note = Phosphorothioate linkage
  modified_base 10^11: mod_base = OTHER; note = Methylphosphonate linkage
  misc_feature 1..23: note = RM109354
tgccatacnntgccaccagggcg

SEQ ID NO: 580 - DNA, 23 bp, synthetic construct
  source 1..23: mol_type = other DNA
  misc_feature 6..7: note = DNA
  misc_feature order(1..5,8..23): note = RNA
  modified_base 5: mod_base = OTHER; note = 2-Prime-O-Methoxyethyl modified 5-methyl Cytidine
  modified_base 6: mod_base = OTHER; note = DNA nucleotide carrying a 6-amino-5-nitro-3-yl-2(1H)-pyridone nucleobase
  modified_base 7: mod_base = OTHER; note = DNA nucleotide carrying a hypoxanthine nucleobase
  modified_base order(4,9..10,17): mod_base = OTHER; note = 2-Prime-Fluoro modified nucleoside
  modified_base order(1..3,8,11..16,18..23): mod_base = OTHER; note = 2-Prime-O-Methyl modified nucleoside
  modified_base order(1^2,22^23): mod_base = OTHER; note = (1,3-dimethylimidazolidin-2-ylidene) Phosphoramidate linkage
  modified_base order(2..7,8..22): mod_base = OTHER; note = Phosphorothioate linkage
  modified_base 7^8: mod_base = OTHER; note = Methylphosphonate linkage
  misc_feature 1..23: note = RM109355
catacnntgccaccagggcgatg

SEQ ID NO: 581 - DNA, 23 bp, synthetic construct
  source 1..23: mol_type = other DNA
  misc_feature 18..19: note = DNA
  misc_feature order(1..17,20..23): note = RNA
  modified_base 17: mod_base = OTHER; note = 2-Prime-O-Methoxyethyl modified 5-methyl Cytidine
  modified_base 18: mod_base = OTHER; note = DNA nucleotide carrying a 6-amino-5-nitro-3-yl-2(1H)-pyridone nucleobase
  modified_base 19: mod_base = OTHER; note = DNA nucleotide carrying a hypoxanthine nucleobase
  modified_base order(9,16,21..22): mod_base = OTHER; note = 2-Prime-Fluoro modified nucleoside
  modified_base order(1..8,10..15,20,23): mod_base = OTHER; note = 2-Prime-O-Methyl modified nucleoside
  modified_base order(1^2,22^23): mod_base = OTHER; note = (1,3-dimethylimidazolidin-2-ylidene) Phosphoramidate linkage
  modified_base order(2..19,20..22): mod_base = OTHER; note = Phosphorothioate linkage
  modified_base 19^20: mod_base = OTHER; note = Methylphosphonate linkage
  misc_feature 1..23: note = RM109356
ggggcatgatgccatacnntgcc

SEQ ID NO: 582 - DNA, 23 bp, synthetic construct
  source 1..23: mol_type = other DNA
  misc_feature 15..16: note = DNA
  misc_feature order(1..14,17..23): note = RNA
  modified_base 14: mod_base = OTHER; note = 2-Prime-O-Methoxyethyl modified 5-methyl Cytidine
  modified_base 15: mod_base = OTHER; note = DNA nucleotide carrying a 6-amino-5-nitro-3-yl-2(1H)-pyridone nucleobase
  modified_base 16: mod_base = OTHER; note = DNA nucleotide carrying a hypoxanthine nucleobase
  modified_base order(6,13,18..19): mod_base = OTHER; note = 2-Prime-Fluoro modified nucleoside
  modified_base order(1..5,7..12,17,20..23): mod_base = OTHER; note = 2-Prime-O-Methyl modified nucleoside
  modified_base order(1^2,22^23): mod_base = OTHER; note = (1,3-dimethylimidazolidin-2-ylidene) Phosphoramidate linkage
  modified_base order(2..16,17..22): mod_base = OTHER; note = Phosphorothioate linkage
  modified_base 16^17: mod_base = OTHER; note = Methylphosphonate linkage
  misc_feature 1..23: note = RM109357
gcatgatgccatacnntgccacc

SEQ ID NO: 583 - DNA, 23 bp, synthetic construct
  source 1..23: mol_type = other DNA
  misc_feature 12..13: note = DNA
  misc_feature order(1..11,14..23): note = RNA
  modified_base 11: mod_base = OTHER; note = 2-Prime-O-Methoxyethyl modified 5-methyl Cytidine
  modified_base 12: mod_base = OTHER; note = DNA nucleotide carrying a 6-amino-5-nitro-3-yl-2(1H)-pyridone nucleobase
  modified_base 13: mod_base = OTHER; note = DNA nucleotide carrying a hypoxanthine nucleobase
  modified_base order(3,10,15..16): mod_base = OTHER; note = 2-Prime-Fluoro modified nucleoside
  modified_base order(1..2,4..9,14,17..23): mod_base = OTHER; note = 2-Prime-O-Methyl modified nucleoside
  modified_base order(1^2,22^23): mod_base = OTHER; note = (1,3-dimethylimidazolidin-2-ylidene) Phosphoramidate linkage
  modified_base order(2..13,14..22): mod_base = OTHER; note = Phosphorothioate linkage
  modified_base 13^14: mod_base = OTHER; note = Methylphosphonate linkage
  misc_feature 1..23: note = RM109358
tgatgccatacnntgccaccagg

SEQ ID NO: 584 - DNA, 26 bp, synthetic construct
  source 1..26: mol_type = other DNA
  misc_feature 13..14: note = DNA
  misc_feature order(1..12,15..26): note = RNA
  modified_base 12: mod_base = OTHER; note = 2-Prime-O-Methoxyethyl modified 5-methyl Cytidine
  modified_base 13: mod_base = OTHER; note = DNA nucleotide carrying a 6-amino-5-nitro-3-yl-2(1H)-pyridone nucleobase
  modified_base 14: mod_base = OTHER; note = DNA nucleotide carrying a hypoxanthine nucleobase
  modified_base order(9..10,16,18,23..24,26): mod_base = OTHER; note = 2-Prime-Fluoro modified nucleoside
  modified_base order(1..8,11,15,17,19..22,25): mod_base = OTHER; note = 2-Prime-O-Methyl modified nucleoside
  modified_base order(1^2,25^26): mod_base = OTHER; note = (1,3-dimethylimidazolidin-2-ylidene) Phosphoramidate linkage
  modified_base order(2..14,15..25): mod_base = OTHER; note = Phosphorothioate linkage
  modified_base 14^15: mod_base = OTHER; note = Methylphosphonate linkage
  misc_feature 1..26: note = RM109359
atgatgccatacnntgccaccagggc

SEQ ID NO: 585 - DNA, 26 bp, synthetic construct
  source 1..26: mol_type = other DNA
  misc_feature 10..11: note = DNA
  misc_feature order(1..9,12..26): note = RNA
  modified_base 9: mod_base = OTHER; note = 2-Prime-O-Methoxyethyl modified 5-methyl Cytidine
  modified_base 10: mod_base = OTHER; note = DNA nucleotide carrying a 6-amino-5-nitro-3-yl-2(1H)-pyridone nucleobase
  modified_base 11: mod_base = OTHER; note = DNA nucleotide carrying a hypoxanthine nucleobase
  modified_base order(6..7,13,15,20..21,23): mod_base = OTHER; note = 2-Prime-Fluoro modified nucleoside
  modified_base order(1..5,8,12,14,16..19,22,24..26): mod_base = OTHER; note = 2-Prime-O-Methyl modified nucleoside
  modified_base order(1^2,25^26): mod_base = OTHER; note = (1,3-dimethylimidazolidin-2-ylidene) Phosphoramidate linkage
  modified_base order(2..11,12..25): mod_base = OTHER; note = Phosphorothioate linkage
  modified_base 11^12: mod_base = OTHER; note = Methylphosphonate linkage
  misc_feature 1..26: note = RM109360
atgccatacnntgccaccagggcgat

SEQ ID NO: 586 - DNA, 26 bp, synthetic construct
  source 1..26: mol_type = other DNA
  misc_feature 7..8: note = DNA
  misc_feature order(1..6,9..26): note = RNA
  modified_base 6: mod_base = OTHER; note = 2-Prime-O-Methoxyethyl modified 5-methyl Cytidine
  modified_base 7: mod_base = OTHER; note = DNA nucleotide carrying a 6-amino-5-nitro-3-yl-2(1H)-pyridone nucleobase
  modified_base 8: mod_base = OTHER; note = DNA nucleotide carrying a hypoxanthine nucleobase
  modified_base order(3..4,10,12,17..18,20): mod_base = OTHER; note = 2-Prime-Fluoro modified nucleoside
  modified_base order(1..2,5,9,11,13..16,19,21..26): mod_base = OTHER; note = 2-Prime-O-Methyl modified nucleoside
  modified_base order(1^2,25^26): mod_base = OTHER; note = (1,3-dimethylimidazolidin-2-ylidene) Phosphoramidate linkage
  modified_base order(2..8,9..25): mod_base = OTHER; note = Phosphorothioate linkage
  modified_base 8^9: mod_base = OTHER; note = Methylphosphonate linkage
  misc_feature 1..26: note = RM109361
ccatacnntgccaccagggcgatggc

SEQ ID NO: 587 - DNA, 26 bp, synthetic construct
  source 1..26: mol_type = other DNA
  misc_feature 19..20: note = DNA
  misc_feature order(1..18,21..26): note = RNA
  modified_base 18: mod_base = OTHER; note = 2-Prime-O-Methoxyethyl modified 5-methyl Cytidine
  modified_base 19: mod_base = OTHER; note = DNA nucleotide carrying a 6-amino-5-nitro-3-yl-2(1H)-pyridone nucleobase
  modified_base 20: mod_base = OTHER; note = DNA nucleotide carrying a hypoxanthine nucleobase
  modified_base order(8,10..11,16,22,24..25): mod_base = OTHER; note = 2-Prime-Fluoro modified nucleoside
  modified_base order(1..7,9,12..15,17,21,23,26): mod_base = OTHER; note = 2-Prime-O-Methyl modified nucleoside
  modified_base order(1^2,25^26): mod_base = OTHER; note = (1,3-dimethylimidazolidin-2-ylidene) Phosphoramidate linkage
  modified_base order(2..20,21..25): mod_base = OTHER; note = Phosphorothioate linkage
  modified_base 20^21: mod_base = OTHER; note = Methylphosphonate linkage
  misc_feature 1..26: note = RM109362
aggggcatgatgccatacnntgccac

SEQ ID NO: 588 - DNA, 26 bp, synthetic construct
  source 1..26: mol_type = other DNA
  misc_feature 16..17: note = DNA
  misc_feature order(1..15,18..26): note = RNA
  modified_base 15: mod_base = OTHER; note = 2-Prime-O-Methoxyethyl modified 5-methyl Cytidine
  modified_base 16: mod_base = OTHER; note = DNA nucleotide carrying a 6-amino-5-nitro-3-yl-2(1H)-pyridone nucleobase
  modified_base 17: mod_base = OTHER; note = DNA nucleotide carrying a hypoxanthine nucleobase
  modified_base order(5,7..8,13,19,21..22): mod_base = OTHER; note = 2-Prime-Fluoro modified nucleoside
  modified_base order(1..4,6,9..12,14,18,20,23..26): mod_base = OTHER; note = 2-Prime-O-Methyl modified nucleoside
  modified_base order(1^2,25^26): mod_base = OTHER; note = (1,3-dimethylimidazolidin-2-ylidene) Phosphoramidate linkage
  modified_base order(2..17,18..25): mod_base = OTHER; note = Phosphorothioate linkage
  modified_base 17^18: mod_base = OTHER; note = Methylphosphonate linkage
  misc_feature 1..26: note = RM109363
ggcatgatgccatacnntgccaccag

SEQ ID NO: 589 - DNA, 26 bp, synthetic construct
  source 1..26: mol_type = other DNA
  misc_feature 13..14: note = DNA
  misc_feature order(1..12,15..26): note = RNA
  modified_base 12: mod_base = OTHER; note = 2-Prime-O-Methoxyethyl modified 5-methyl Cytidine
  modified_base 13: mod_base = OTHER; note = DNA nucleotide carrying a 6-amino-5-nitro-3-yl-2(1H)-pyridone nucleobase
  modified_base 14: mod_base = OTHER; note = DNA nucleotide carrying a hypoxanthine nucleobase
  modified_base order(2,4..5,10,16,18..19): mod_base = OTHER; note = 2-Prime-Fluoro modified nucleoside
  modified_base order(1,3,6..9,11,15,17,20..26): mod_base = OTHER; note = 2-Prime-O-Methyl modified nucleoside
  modified_base order(1^2,25^26): mod_base = OTHER; note = (1,3-dimethylimidazolidin-2-ylidene) Phosphoramidate linkage
  modified_base order(2..14,15..25): mod_base = OTHER; note = Phosphorothioate linkage
  modified_base 14^15: mod_base = OTHER; note = Methylphosphonate linkage
  misc_feature 1..26: note = RM109364
atgatgccatacnntgccaccagggc

SEQ ID NO: 590 - DNA, 26 bp, synthetic construct
  source 1..26: mol_type = other DNA
  misc_feature 16..17: note = DNA
  misc_feature order(1..15,18..26): note = RNA
  modified_base 15: mod_base = OTHER; note = 2-Prime-O-Methoxyethyl modified 5-methyl Cytidine
  modified_base 16: mod_base = OTHER; note = DNA nucleotide carrying a 6-amino-5-nitro-3-yl-2(1H)-pyridone nucleobase
  modified_base 17: mod_base = OTHER; note = DNA nucleotide carrying a hypoxanthine nucleobase
  modified_base order(12..13,19,21,26): mod_base = OTHER; note = 2-Prime-Fluoro modified nucleoside
  modified_base order(1..11,14,18,20,22..25): mod_base = OTHER; note = 2-Prime-O-Methyl modified nucleoside
  modified_base order(1^2,25^26): mod_base = OTHER; note = (1,3-dimethylimidazolidin-2-ylidene) Phosphoramidate linkage
  modified_base order(2..17,18..25): mod_base = OTHER; note = Phosphorothioate linkage
  modified_base 17^18: mod_base = OTHER; note = Methylphosphonate linkage
  misc_feature 1..26: note = RM109365
ggcatgatgccatacnntgccaccag

SEQ ID NO: 591 - DNA, 26 bp, synthetic construct
  source 1..26: mol_type = other DNA
  misc_feature 13..14: note = DNA
  misc_feature order(1..12,15..26): note = RNA
  modified_base 12: mod_base = OTHER; note = 2-Prime-O-Methoxyethyl modified 5-methyl Cytidine
  modified_base 13: mod_base = OTHER; note = DNA nucleotide carrying a 6-amino-5-nitro-3-yl-2(1H)-pyridone nucleobase
  modified_base 14: mod_base = OTHER; note = DNA nucleotide carrying a hypoxanthine nucleobase
  modified_base order(9..10,16,18,23): mod_base = OTHER; note = 2-Prime-Fluoro modified nucleoside
  modified_base order(1..8,11,15,17,19..22,24..26): mod_base = OTHER; note = 2-Prime-O-Methyl modified nucleoside
  modified_base order(1^2,25^26): mod_base = OTHER; note = (1,3-dimethylimidazolidin-2-ylidene) Phosphoramidate linkage
  modified_base order(2..14,15..25): mod_base = OTHER; note = Phosphorothioate linkage
  modified_base 14^15: mod_base = OTHER; note = Methylphosphonate linkage
  misc_feature 1..26: note = RM109366
atgatgccatacnntgccaccagggc

SEQ ID NO: 592 - DNA, 26 bp, synthetic construct
  source 1..26: mol_type = other DNA
  misc_feature 10..11: note = DNA
  misc_feature order(1..9,12..26): note = RNA
  modified_base 9: mod_base = OTHER; note = 2-Prime-O-Methoxyethyl modified 5-methyl Cytidine
  modified_base 10: mod_base = OTHER; note = DNA nucleotide carrying a 6-amino-5-nitro-3-yl-2(1H)-pyridone nucleobase
  modified_base 11: mod_base = OTHER; note = DNA nucleotide carrying a hypoxanthine nucleobase
  modified_base order(6..7,13,15,20): mod_base = OTHER; note = 2-Prime-Fluoro modified nucleoside
  modified_base order(1..5,8,12,14,16..19,21..26): mod_base = OTHER; note = 2-Prime-O-Methyl modified nucleoside
  modified_base order(1^2,25^26): mod_base = OTHER; note = (1,3-dimethylimidazolidin-2-ylidene) Phosphoramidate linkage
  modified_base order(2..11,12..25): mod_base = OTHER; note = Phosphorothioate linkage
  modified_base 11^12: mod_base = OTHER; note = Methylphosphonate linkage
  misc_feature 1..26: note = RM109367
atgccatacnntgccaccagggcgat

SEQ ID NO: 593 - DNA, 26 bp, synthetic construct
  source 1..26: mol_type = other DNA
  misc_feature 7..8: note = DNA
  misc_feature order(1..6,9..26): note = RNA
  modified_base 6: mod_base = OTHER; note = 2-Prime-O-Methoxyethyl modified 5-methyl Cytidine
  modified_base 7: mod_base = OTHER; note = DNA nucleotide carrying a 6-amino-5-nitro-3-yl-2(1H)-pyridone nucleobase
  modified_base 8: mod_base = OTHER; note = DNA nucleotide carrying a hypoxanthine nucleobase
  modified_base order(3..4,10,12,17): mod_base = OTHER; note = 2-Prime-Fluoro modified nucleoside
  modified_base order(1..2,5,9,11,13..16,18..26): mod_base = OTHER; note = 2-Prime-O-Methyl modified nucleoside
  modified_base order(1^2,25^26): mod_base = OTHER; note = (1,3-dimethylimidazolidin-2-ylidene) Phosphoramidate linkage
  modified_base order(2..8,9..25): mod_base = OTHER; note = Phosphorothioate linkage
  modified_base 8^9: mod_base = OTHER; note = Methylphosphonate linkage
  misc_feature 1..26: note = RM109368
ccatacnntgccaccagggcgatggc

SEQ ID NO: 594 - DNA, 29 bp, synthetic construct
  source 1..29: mol_type = other DNA
  misc_feature 18..19: note = DNA
  misc_feature order(1..17,20..29): note = RNA
  modified_base 17: mod_base = OTHER; note = 2-Prime-O-Methoxyethyl modified 5-methyl Cytidine
  modified_base 18: mod_base = OTHER; note = DNA nucleotide carrying a 6-amino-5-nitro-3-yl-2(1H)-pyridone nucleobase
  modified_base 19: mod_base = OTHER; note = DNA nucleotide carrying a hypoxanthine nucleobase
  modified_base order(14..15,21,23,28): mod_base = OTHER; note = 2-Prime-Fluoro modified nucleoside
  modified_base order(1..13,16,20,22,24..27,29): mod_base = OTHER; note = 2-Prime-O-Methyl modified nucleoside
  modified_base order(1^2,28^29): mod_base = OTHER; note = (1,3-dimethylimidazolidin-2-ylidene) Phosphoramidate linkage
  modified_base order(2..19,20..28): mod_base = OTHER; note = Phosphorothioate linkage
  modified_base 19^20: mod_base = OTHER; note = Methylphosphonate linkage
  misc_feature 1..29: note = RM109369
ggggcatgatgccatacnntgccaccagg

SEQ ID NO: 595 - DNA, 29 bp, synthetic construct
  source 1..29: mol_type = other DNA
  misc_feature 15..16: note = DNA
  misc_feature order(1..14,17..29): note = RNA
  modified_base 14: mod_base = OTHER; note = 2-Prime-O-Methoxyethyl modified 5-methyl Cytidine
  modified_base 15: mod_base = OTHER; note = DNA nucleotide carrying a 6-amino-5-nitro-3-yl-2(1H)-pyridone nucleobase
  modified_base 16: mod_base = OTHER; note = DNA nucleotide carrying a hypoxanthine nucleobase
  modified_base order(11..12,18,20,25): mod_base = OTHER; note = 2-Prime-Fluoro modified nucleoside
  modified_base order(1..10,13,17,19,21..24,26..29): mod_base = OTHER; note = 2-Prime-O-Methyl modified nucleoside
  modified_base order(1^2,28^29): mod_base = OTHER; note = (1,3-dimethylimidazolidin-2-ylidene) Phosphoramidate linkage
  modified_base order(2..16,17..28): mod_base = OTHER; note = Phosphorothioate linkage
  modified_base 16^17: mod_base = OTHER; note = Methylphosphonate linkage
  misc_feature 1..29: note = RM109370
gcatgatgccatacnntgccaccagggcg

SEQ ID NO: 596 - DNA, 29 bp, synthetic construct
  source 1..29: mol_type = other DNA
  misc_feature 12..13: note = DNA
  misc_feature order(1..11,14..29): note = RNA
  modified_base 11: mod_base = OTHER; note = 2-Prime-O-Methoxyethyl modified 5-methyl Cytidine
  modified_base 12: mod_base = OTHER; note = DNA nucleotide carrying a 6-amino-5-nitro-3-yl-2(1H)-pyridone nucleobase
  modified_base 13: mod_base = OTHER; note = DNA nucleotide carrying a hypoxanthine nucleobase
  modified_base order(8..9,15,17,22): mod_base = OTHER; note = 2-Prime-Fluoro modified nucleoside
  modified_base order(1..7,10,14,16,18..21,23..29): mod_base = OTHER; note = 2-Prime-O-Methyl modified nucleoside
  modified_base order(1^2,28^29): mod_base = OTHER; note = (1,3-dimethylimidazolidin-2-ylidene) Phosphoramidate linkage
  modified_base order(2..13,14..28): mod_base = OTHER; note = Phosphorothioate linkage
  modified_base 13^14: mod_base = OTHER; note = Methylphosphonate linkage
  misc_feature 1..29: note = RM109371
tgatgccatacnntgccaccagggcgatg

SEQ ID NO: 597 - DNA, 29 bp, synthetic construct
  source 1..29: mol_type = other DNA
  misc_feature 9..10: note = DNA
  misc_feature order(1..8,11..29): note = RNA
  modified_base 8: mod_base = OTHER; note = 2-Prime-O-Methoxyethyl modified 5-methyl Cytidine
  modified_base 9: mod_base = OTHER; note = DNA nucleotide carrying a 6-amino-5-nitro-3-yl-2(1H)-pyridone nucleobase
  modified_base 10: mod_base = OTHER; note = DNA nucleotide carrying a hypoxanthine nucleobase
  modified_base order(5..6,12,14,19): mod_base = OTHER; note = 2-Prime-Fluoro modified nucleoside
  modified_base order(1..4,7,11,13,15..18,20..29): mod_base = OTHER; note = 2-Prime-O-Methyl modified nucleoside
  modified_base order(1^2,28^29): mod_base = OTHER; note = (1,3-dimethylimidazolidin-2-ylidene) Phosphoramidate linkage
  modified_base order(2..10,11..28): mod_base = OTHER; note = Phosphorothioate linkage
  modified_base 10^11: mod_base = OTHER; note = Methylphosphonate linkage
  misc_feature 1..29: note = RM109372
tgccatacnntgccaccagggcgatggcc

SEQ ID NO: 598 - DNA, 29 bp, synthetic construct
  source 1..29: mol_type = other DNA
  misc_feature 6..7: note = DNA
  misc_feature order(1..5,8..29): note = RNA
  modified_base 5: mod_base = OTHER; note = 2-Prime-O-Methoxyethyl modified 5-methyl Cytidine
  modified_base 6: mod_base = OTHER; note = DNA nucleotide carrying a 6-amino-5-nitro-3-yl-2(1H)-pyridone nucleobase
  modified_base 7: mod_base = OTHER; note = DNA nucleotide carrying a hypoxanthine nucleobase
  modified_base order(2..3,9,11,16): mod_base = OTHER; note = 2-Prime-Fluoro modified nucleoside
  modified_base order(1,4,8,10,12..15,17..29): mod_base = OTHER; note = 2-Prime-O-Methyl modified nucleoside
  modified_base order(1^2,28^29): mod_base = OTHER; note = (1,3-dimethylimidazolidin-2-ylidene) Phosphoramidate linkage
  modified_base order(2..7,8..28): mod_base = OTHER; note = Phosphorothioate linkage
  modified_base 7^8: mod_base = OTHER; note = Methylphosphonate linkage
  misc_feature 1..29: note = RM109373
catacnntgccaccagggcgatggccagc

SEQ ID NO: 599 - DNA, 26 bp, synthetic construct
  source 1..26: mol_type = other DNA
  misc_feature 19..20: note = DNA
  misc_feature order(1..18,21..26): note = RNA
  modified_base 18: mod_base = OTHER; note = 2-Prime-O-Methoxyethyl modified 5-methyl Cytidine
  modified_base 19: mod_base = OTHER; note = DNA nucleotide carrying a 6-amino-5-nitro-3-yl-2(1H)-pyridone nucleobase
  modified_base 20: mod_base = OTHER; note = DNA nucleotide carrying a hypoxanthine nucleobase
  modified_base order(11,16,22,24..25): mod_base = OTHER; note = 2-Prime-Fluoro modified nucleoside
  modified_base order(1..10,12..15,17,21,23,26): mod_base = OTHER; note = 2-Prime-O-Methyl modified nucleoside
  modified_base order(1^2,25^26): mod_base = OTHER; note = (1,3-dimethylimidazolidin-2-ylidene) Phosphoramidate linkage
  modified_base order(2..20,21..25): mod_base = OTHER; note = Phosphorothioate linkage
  modified_base 20^21: mod_base = OTHER; note = Methylphosphonate linkage
  misc_feature 1..26: note = RM109374
aggggcatgatgccatacnntgccac

SEQ ID NO: 600 - DNA, 26 bp, synthetic construct
  source 1..26: mol_type = other DNA
  misc_feature 16..17: note = DNA
  misc_feature order(1..15,18..26): note = RNA
  modified_base 15: mod_base = OTHER; note = 2-Prime-O-Methoxyethyl modified 5-methyl Cytidine
  modified_base 16: mod_base = OTHER; note = DNA nucleotide carrying a 6-amino-5-nitro-3-yl-2(1H)-pyridone nucleobase
  modified_base 17: mod_base = OTHER; note = DNA nucleotide carrying a hypoxanthine nucleobase
  modified_base order(8,13,19,21..22): mod_base = OTHER; note = 2-Prime-Fluoro modified nucleoside
  modified_base order(1..7,9..12,14,18,20,23..26): mod_base = OTHER; note = 2-Prime-O-Methyl modified nucleoside
  modified_base order(1^2,25^26): mod_base = OTHER; note = (1,3-dimethylimidazolidin-2-ylidene) Phosphoramidate linkage
  modified_base order(2..17,18..25): mod_base = OTHER; note = Phosphorothioate linkage
  modified_base 17^18: mod_base = OTHER; note = Methylphosphonate linkage
  misc_feature 1..26: note = RM109375
ggcatgatgccatacnntgccaccag

SEQ ID NO: 601 - DNA, 26 bp, synthetic construct
  source 1..26: mol_type = other DNA
  misc_feature 13..14: note = DNA
  misc_feature order(1..12,15..26): note = RNA
  modified_base 12: mod_base = OTHER; note = 2-Prime-O-Methoxyethyl modified 5-methyl Cytidine
  modified_base 13: mod_base = OTHER; note = DNA nucleotide carrying a 6-amino-5-nitro-3-yl-2(1H)-pyridone nucleobase
  modified_base 14: mod_base = OTHER; note = DNA nucleotide carrying a hypoxanthine nucleobase
  modified_base order(5,10,16,18..19): mod_base = OTHER; note = 2-Prime-Fluoro modified nucleoside
  modified_base order(1..4,6..9,11,15,17,20..26): mod_base = OTHER; note = 2-Prime-O-Methyl modified nucleoside
  modified_base order(1^2,25^26): mod_base = OTHER; note = (1,3-dimethylimidazolidin-2-ylidene) Phosphoramidate linkage
  modified_base order(2..14,15..25): mod_base = OTHER; note = Phosphorothioate linkage
  modified_base 14^15: mod_base = OTHER; note = Methylphosphonate linkage
  misc_feature 1..26: note = RM109376
atgatgccatacnntgccaccagggc

SEQ ID NO: 602 - DNA, 26 bp, synthetic construct
  source 1..26: mol_type = other DNA
  misc_feature 10..11: note = DNA
  misc_feature order(1..9,12..26): note = RNA
  modified_base 9: mod_base = OTHER; note = 2-Prime-O-Methoxyethyl modified 5-methyl Cytidine
  modified_base 10: mod_base = OTHER; note = DNA nucleotide carrying a 6-amino-5-nitro-3-yl-2(1H)-pyridone nucleobase
  modified_base 11: mod_base = OTHER; note = DNA nucleotide carrying a hypoxanthine nucleobase
  modified_base order(2,7,13,15..16): mod_base = OTHER; note = 2-Prime-Fluoro modified nucleoside
  modified_base order(1,3..6,8,12,14,17..26): mod_base = OTHER; note = 2-Prime-O-Methyl modified nucleoside
  modified_base order(1^2,25^26): mod_base = OTHER; note = (1,3-dimethylimidazolidin-2-ylidene) Phosphoramidate linkage
  modified_base order(2..11,12..25): mod_base = OTHER; note = Phosphorothioate linkage
  modified_base 11^12: mod_base = OTHER; note = Methylphosphonate linkage
  misc_feature 1..26: note = RM109377
atgccatacnntgccaccagggcgat

SEQ ID NO: 603 - DNA, 29 bp, synthetic construct
  source 1..29: mol_type = other DNA
  misc_feature 21..22: note = DNA
  misc_feature order(1..20,23..29): note = RNA
  modified_base 20: mod_base = OTHER; note = 2-Prime-O-Methoxyethyl modified 5-methyl Cytidine
  modified_base 21: mod_base = OTHER; note = DNA nucleotide carrying a 6-amino-5-nitro-3-yl-2(1H)-pyridone nucleobase
  modified_base 22: mod_base = OTHER; note = DNA nucleotide carrying a hypoxanthine nucleobase
  modified_base order(13,18,24,26..27): mod_base = OTHER; note = 2-Prime-Fluoro modified nucleoside
  modified_base order(1..12,14..17,19,23,25,28..29): mod_base = OTHER; note = 2-Prime-O-Methyl modified nucleoside
  modified_base order(1^2,28^29): mod_base = OTHER; note = (1,3-dimethylimidazolidin-2-ylidene) Phosphoramidate linkage
  modified_base order(2..22,23..28): mod_base = OTHER; note = Phosphorothioate linkage
  modified_base 22^23: mod_base = OTHER; note = Methylphosphonate linkage
  misc_feature 1..29: note = RM109378
tgaggggcatgatgccatacnntgccacc

SEQ ID NO: 604 - DNA, 29 bp, synthetic construct
  source 1..29: mol_type = other DNA
  misc_feature 18..19: note = DNA
  misc_feature order(1..17,20..29): note = RNA
  modified_base 17: mod_base = OTHER; note = 2-Prime-O-Methoxyethyl modified 5-methyl Cytidine
  modified_base 18: mod_base = OTHER; note = DNA nucleotide carrying a 6-amino-5-nitro-3-yl-2(1H)-pyridone nucleobase
  modified_base 19: mod_base = OTHER; note = DNA nucleotide carrying a hypoxanthine nucleobase
  modified_base order(10,15,21,23..24): mod_base = OTHER; note = 2-Prime-Fluoro modified nucleoside
  modified_base order(1..9,11..14,16,20,22,25..29): mod_base = OTHER; note = 2-Prime-O-Methyl modified nucleoside
  modified_base order(1^2,28^29): mod_base = OTHER; note = (1,3-dimethylimidazolidin-2-ylidene) Phosphoramidate linkage
  modified_base order(2..19,20..28): mod_base = OTHER; note = Phosphorothioate linkage
  modified_base 19^20: mod_base = OTHER; note = Methylphosphonate linkage
  misc_feature 1..29: note = RM109379
ggggcatgatgccatacnntgccaccagg

SEQ ID NO: 605 - DNA, 29 bp, synthetic construct
  source 1..29: mol_type = other DNA
  misc_feature 15..16: note = DNA
  misc_feature order(1..14,17..29): note = RNA
  modified_base 14: mod_base = OTHER; note = 2-Prime-O-Methoxyethyl modified 5-methyl Cytidine
  modified_base 15: mod_base = OTHER; note = DNA nucleotide carrying a 6-amino-5-nitro-3-yl-2(1H)-pyridone nucleobase
  modified_base 16: mod_base = OTHER; note = DNA nucleotide carrying a hypoxanthine nucleobase
  modified_base order(7,12,18,20..21): mod_base = OTHER; note = 2-Prime-Fluoro modified nucleoside
  modified_base order(1..6,8..11,13,17,19,22..29): mod_base = OTHER; note = 2-Prime-O-Methyl modified nucleoside
  modified_base order(1^2,28^29): mod_base = OTHER; note = (1,3-dimethylimidazolidin-2-ylidene) Phosphoramidate linkage
  modified_base order(2..16,17..28): mod_base = OTHER; note = Phosphorothioate linkage
  modified_base 16^17: mod_base = OTHER; note = Methylphosphonate linkage
  misc_feature 1..29: note = RM109380
gcatgatgccatacnntgccaccagggcg

SEQ ID NO: 606 - DNA, 29 bp, synthetic construct
  source 1..29: mol_type = other DNA
  misc_feature 12..13: note = DNA
  misc_feature order(1..11,14..29): note = RNA
  modified_base 11: mod_base = OTHER; note = 2-Prime-O-Methoxyethyl modified 5-methyl Cytidine
  modified_base 12: mod_base = OTHER; note = DNA nucleotide carrying a 6-amino-5-nitro-3-yl-2(1H)-pyridone nucleobase
  modified_base 13: mod_base = OTHER; note = DNA nucleotide carrying a hypoxanthine nucleobase
  modified_base order(4,9,15,17..18): mod_base = OTHER; note = 2-Prime-Fluoro modified nucleoside
  modified_base order(1..3,5..8,10,14,16,19..29): mod_base = OTHER; note = 2-Prime-O-Methyl modified nucleoside
  modified_base order(1^2,28^29): mod_base = OTHER; note = (1,3-dimethylimidazolidin-2-ylidene) Phosphoramidate linkage
  modified_base order(2..13,14..28): mod_base = OTHER; note = Phosphorothioate linkage
  modified_base 13^14: mod_base = OTHER; note = Methylphosphonate linkage
  misc_feature 1..29: note = RM109381
tgatgccatacnntgccaccagggcgatg

SEQ ID NO: 607 - DNA, 29 bp, synthetic construct
  source 1..29: mol_type = other DNA
  misc_feature 9..10: note = DNA
  misc_feature order(1..8,11..29): note = RNA
  modified_base 8: mod_base = OTHER; note = 2-Prime-O-Methoxyethyl modified 5-methyl Cytidine
  modified_base 9: mod_base = OTHER; note = DNA nucleotide carrying a 6-amino-5-nitro-3-yl-2(1H)-pyridone nucleobase
  modified_base 10: mod_base = OTHER; note = DNA nucleotide carrying a hypoxanthine nucleobase
  modified_base order(1,6,12,14..15): mod_base = OTHER; note = 2-Prime-Fluoro modified nucleoside
  modified_base order(2..5,7,11,13,16..29): mod_base = OTHER; note = 2-Prime-O-Methyl modified nucleoside
  modified_base order(1^2,28^29): mod_base = OTHER; note = (1,3-dimethylimidazolidin-2-ylidene) Phosphoramidate linkage
  modified_base order(2..10,11..28): mod_base = OTHER; note = Phosphorothioate linkage
  modified_base 10^11: mod_base = OTHER; note = Methylphosphonate linkage
  misc_feature 1..29: note = RM109382
tgccatacnntgccaccagggcgatggcc

SEQ ID NO: 608 - DNA, 32 bp, synthetic construct; identical to SEQ ID NO: 187
  source 1..32: mol_type = other DNA
  misc_feature 22..23: note = DNA
  misc_feature order(1..21,24..32): note = RNA
  modified_base 21: mod_base = OTHER; note = 2-Prime-O-Methoxyethyl modified 5-methyl Cytidine
  modified_base 22: mod_base = OTHER; note = DNA nucleotide carrying a 6-amino-5-nitro-3-yl-2(1H)-pyridone nucleobase
  modified_base 23: mod_base = OTHER; note = DNA nucleotide carrying a hypoxanthine nucleobase
  modified_base order(8,13,16,18..19,25..26,31..32): mod_base = OTHER; note = 2-Prime-Fluoro modified nucleoside
  modified_base order(1..7,9..12,14..15,17,20,24,27..30): mod_base = OTHER; note = 2-Prime-O-Methyl modified nucleoside
  modified_base order(1^2,31^32): mod_base = OTHER; note = (1,3-dimethylimidazolidin-2-ylidene) Phosphoramidate linkage
  modified_base order(2..23,24..31): mod_base = OTHER; note = Phosphorothioate linkage
  modified_base 23^24: mod_base = OTHER; note = Methylphosphonate linkage
  misc_feature 1..32: note = RM109383

SEQ ID NO: 609 - DNA, 32 bp, synthetic construct; identical to SEQ ID NO: 5
  source 1..32: mol_type = other DNA
  misc_feature 19..20: note = DNA
  misc_feature order(1..18,21..32): note = RNA
  modified_base 18: mod_base = OTHER; note = 2-Prime-O-Methoxyethyl modified 5-methyl Cytidine
  modified_base 19: mod_base = OTHER; note = DNA nucleotide carrying a 6-amino-5-nitro-3-yl-2(1H)-pyridone nucleobase
  modified_base 20: mod_base = OTHER; note = DNA nucleotide carrying a hypoxanthine nucleobase
  modified_base order(5,10,13,15..16,22..23,28..29): mod_base = OTHER; note = 2-Prime-Fluoro modified nucleoside
  modified_base order(1..4,6..9,11..12,14,17,21,24..27,30..32): mod_base = OTHER; note = 2-Prime-O-Methyl modified nucleoside
  modified_base order(1^2,31^32): mod_base = OTHER; note = (1,3-dimethylimidazolidin-2-ylidene) Phosphoramidate linkage
  modified_base order(2..20,21..31): mod_base = OTHER; note = Phosphorothioate linkage
  modified_base 20^21: mod_base = OTHER; note = Methylphosphonate linkage
  misc_feature 1..32: note = RM109384

SEQ ID NO: 610 - DNA, 32 bp, synthetic construct; identical to SEQ ID NO: 189
  source 1..32: mol_type = other DNA
  misc_feature 16..17: note = DNA
  misc_feature order(1..15,18..32): note = RNA
  modified_base 15: mod_base = OTHER; note = 2-Prime-O-Methoxyethyl modified 5-methyl Cytidine
  modified_base 16: mod_base = OTHER; note = DNA nucleotide carrying a 6-amino-5-nitro-3-yl-2(1H)-pyridone nucleobase
  modified_base 17: mod_base = OTHER; note = DNA nucleotide carrying a hypoxanthine nucleobase
  modified_base order(2,7,10,12..13,19..20,25..26): mod_base = OTHER; note = 2-Prime-Fluoro modified nucleoside
  modified_base order(1,3..6,8..9,11,14,18,21..24,27..32): mod_base = OTHER; note = 2-Prime-O-Methyl modified nucleoside
  modified_base order(1^2,31^32): mod_base = OTHER; note = (1,3-dimethylimidazolidin-2-ylidene) Phosphoramidate linkage
  modified_base order(2..17,18..31): mod_base = OTHER; note = Phosphorothioate linkage
  modified_base 17^18: mod_base = OTHER; note = Methylphosphonate linkage
  misc_feature 1..32: note = RM109385

SEQ ID NO: 611 - DNA, 32 bp, synthetic construct; identical to SEQ ID NO: 189
  source 1..32: mol_type = other DNA
  misc_feature 16..17: note = DNA
  misc_feature order(1..15,18..32): note = RNA
  modified_base 15: mod_base = OTHER; note = 2-Prime-O-Methoxyethyl modified 5-methyl Cytidine
  modified_base 16: mod_base = OTHER; note = DNA nucleotide carrying a 6-amino-5-nitro-3-yl-2(1H)-pyridone nucleobase
  modified_base 17: mod_base = OTHER; note = DNA nucleotide carrying a hypoxanthine nucleobase
  modified_base order(8..9,14,19,21..22,24,27,32): mod_base = OTHER; note = 2-Prime-Fluoro modified nucleoside
  modified_base order(1..7,10..13,18,20,23,25..26,28..31): mod_base = OTHER; note = 2-Prime-O-Methyl modified nucleoside
  modified_base order(1^2,31^32): mod_base = OTHER; note = (1,3-dimethylimidazolidin-2-ylidene) Phosphoramidate linkage
  modified_base order(2..17,18..31): mod_base = OTHER; note = Phosphorothioate linkage
  modified_base 17^18: mod_base = OTHER; note = Methylphosphonate linkage
  misc_feature 1..32: note = RM109386

SEQ ID NO: 612 - DNA, 32 bp, synthetic construct; identical to SEQ ID NO: 190
  source 1..32: mol_type = other DNA
  misc_feature 13..14: note = DNA
  misc_feature order(1..12,15..32): note = RNA
  modified_base 12: mod_base = OTHER; note = 2-Prime-O-Methoxyethyl modified 5-methyl Cytidine
  modified_base 13: mod_base = OTHER; note = DNA nucleotide carrying a 6-amino-5-nitro-3-yl-2(1H)-pyridone nucleobase
  modified_base 14: mod_base = OTHER; note = DNA nucleotide carrying a hypoxanthine nucleobase
  modified_base order(5..6,11,16,18..19,21,24,29): mod_base = OTHER; note = 2-Prime-Fluoro modified nucleoside
  modified_base order(1..4,7..10,15,17,20,22..23,25..28,30..32): mod_base = OTHER; note = 2-Prime-O-Methyl modified nucleoside
  modified_base order(1^2,31^32): mod_base = OTHER; note = (1,3-dimethylimidazolidin-2-ylidene) Phosphoramidate linkage
  modified_base order(2..14,15..31): mod_base = OTHER; note = Phosphorothioate linkage
  modified_base 14^15: mod_base = OTHER; note = Methylphosphonate linkage
  misc_feature 1..32: note = RM109387

SEQ ID NO: 613 - DNA, 32 bp, synthetic construct; identical to SEQ ID NO: 191
  source 1..32: mol_type = other DNA
  misc_feature 10..11: note = DNA
  misc_feature order(1..9,12..32): note = RNA
  modified_base 9: mod_base = OTHER; note = 2-Prime-O-Methoxyethyl modified 5-methyl Cytidine
  modified_base 10: mod_base = OTHER; note = DNA nucleotide carrying a 6-amino-5-nitro-3-yl-2(1H)-pyridone nucleobase
  modified_base 11: mod_base = OTHER; note = DNA nucleotide carrying a hypoxanthine nucleobase
  modified_base order(2..3,8,13,15..16,18,21,26): mod_base = OTHER; note = 2-Prime-Fluoro modified nucleoside
  modified_base order(1,4..7,12,14,17,19..20,22..25,27..32): mod_base = OTHER; note = 2-Prime-O-Methyl modified nucleoside
  modified_base order(1^2,31^32): mod_base = OTHER; note = (1,3-dimethylimidazolidin-2-ylidene) Phosphoramidate linkage
  modified_base order(2..11,12..31): mod_base = OTHER; note = Phosphorothioate linkage
  modified_base 11^12: mod_base = OTHER; note = Methylphosphonate linkage
  misc_feature 1..32: note = RM109388

SEQ ID NO: 614 - DNA, 23 bp, synthetic construct
  source 1..23: mol_type = other DNA
  misc_feature 18..19: note = DNA
  misc_feature order(1..17,20..23): note = RNA
  modified_base 17: mod_base = OTHER; note = 2-Prime-O-Methoxyethyl modified 5-methyl Cytidine
  modified_base 18: mod_base = OTHER; note = DNA nucleotide carrying a 6-amino-5-nitro-3-yl-2(1H)-pyridone nucleobase
  modified_base 19: mod_base = OTHER; note = DNA nucleotide carrying a hypoxanthine nucleobase
  modified_base order(9,12,14..15,21..22): mod_base = OTHER; note = 2-Prime-Fluoro modified nucleoside
  modified_base order(1..8,10..11,13,16,20,23): mod_base = OTHER; note = 2-Prime-O-Methyl modified nucleoside
  modified_base order(1^2,22^23): mod_base = OTHER; note = (1,3-dimethylimidazolidin-2-ylidene) Phosphoramidate linkage
  modified_base order(2..19,20..22): mod_base = OTHER; note = Phosphorothioate linkage
  modified_base 19^20: mod_base = OTHER; note = Methylphosphonate linkage
  misc_feature 1..23: note = RM109389
ggggcatgatgccatacnntgcc

SEQ ID NO: 615 - DNA, 23 bp, synthetic construct
  source 1..23: mol_type = other DNA
  misc_feature 15..16: note = DNA
  misc_feature order(1..14,17..23): note = RNA
  modified_base 14: mod_base = OTHER; note = 2-Prime-O-Methoxyethyl modified 5-methyl Cytidine
  modified_base 15: mod_base = OTHER; note = DNA nucleotide carrying a 6-amino-5-nitro-3-yl-2(1H)-pyridone nucleobase
  modified_base 16: mod_base = OTHER; note = DNA nucleotide carrying a hypoxanthine nucleobase
  modified_base order(6,9,11..12,18..19): mod_base = OTHER; note = 2-Prime-Fluoro modified nucleoside
  modified_base order(1..5,7..8,10,13,17,20..23): mod_base = OTHER; note = 2-Prime-O-Methyl modified nucleoside
  modified_base order(1^2,22^23): mod_base = OTHER; note = (1,3-dimethylimidazolidin-2-ylidene) Phosphoramidate linkage
  modified_base order(2..16,17..22): mod_base = OTHER; note = Phosphorothioate linkage
  modified_base 16^17: mod_base = OTHER; note = Methylphosphonate linkage
  misc_feature 1..23: note = RM109390
gcatgatgccatacnntgccacc

SEQ ID NO: 616 - DNA, 23 bp, synthetic construct
  source 1..23: mol_type = other DNA
  misc_feature 12..13: note = DNA
  misc_feature order(1..11,14..23): note = RNA
  modified_base 11: mod_base = OTHER; note = 2-Prime-O-Methoxyethyl modified 5-methyl Cytidine
  modified_base 12: mod_base = OTHER; note = DNA nucleotide carrying a 6-amino-5-nitro-3-yl-2(1H)-pyridone nucleobase
  modified_base 13: mod_base = OTHER; note = DNA nucleotide carrying a hypoxanthine nucleobase
  modified_base order(3,6,8..9,15..16): mod_base = OTHER; note = 2-Prime-Fluoro modified nucleoside
  modified_base order(1..2,4..5,7,10,14,17..23): mod_base = OTHER; note = 2-Prime-O-Methyl modified nucleoside
  modified_base order(1^2,22^23): mod_base = OTHER; note = (1,3-dimethylimidazolidin-2-ylidene) Phosphoramidate linkage
  modified_base order(2..13,14..22): mod_base = OTHER; note = Phosphorothioate linkage
  modified_base 13^14: mod_base = OTHER; note = Methylphosphonate linkage
  misc_feature 1..23: note = RM109391
tgatgccatacnntgccaccagg

SEQ ID NO: 617 - DNA, 32 bp, synthetic construct; identical to SEQ ID NO: 185
  source 1..32: mol_type = other DNA
  misc_feature 28..29: note = DNA
  misc_feature order(1..27,30..32): note = RNA
  modified_base 27: mod_base = OTHER; note = 2-Prime-O-Methoxyethyl modified 5-methyl Cytidine
  modified_base 28: mod_base = OTHER; note = DNA nucleotide carrying a 6-amino-5-nitro-3-yl-2(1H)-pyridone nucleobase
  modified_base 29: mod_base = OTHER; note = DNA nucleotide carrying a hypoxanthine nucleobase
  modified_base order(19,22,24..25,31..32): mod_base = OTHER; note = 2-Prime-Fluoro modified nucleoside
  modified_base order(1..18,20..21,23,26,30): mod_base = OTHER; note = 2-Prime-O-Methyl modified nucleoside
  modified_base order(1^2,31^32): mod_base = OTHER; note = (1,3-dimethylimidazolidin-2-ylidene) Phosphoramidate linkage
  modified_base order(2..29,30^31): mod_base = OTHER; note = Phosphorothioate linkage
  modified_base 29^30: mod_base = OTHER; note = Methylphosphonate linkage
  misc_feature 1..32: note = RM109392

SEQ ID NO: 618 - DNA, 32 bp, synthetic construct; identical to SEQ ID NO: 186
  source 1..32: mol_type = other DNA
  misc_feature 25..26: note = DNA
  misc_feature order(1..24,27..32): note = RNA
  modified_base 24: mod_base = OTHER; note = 2-Prime-O-Methoxyethyl modified 5-methyl Cytidine
  modified_base 25: mod_base = OTHER; note = DNA nucleotide carrying a 6-amino-5-nitro-3-yl-2(1H)-pyridone nucleobase
  modified_base 26: mod_base = OTHER; note = DNA nucleotide carrying a hypoxanthine nucleobase
  modified_base order(16,19,21..22,28..29): mod_base = OTHER; note = 2-Prime-Fluoro modified nucleoside
  modified_base order(1..15,17..18,20,23,27,30..32): mod_base = OTHER; note = 2-Prime-O-Methyl modified nucleoside
  modified_base order(1^2,31^32): mod_base = OTHER; note = (1,3-dimethylimidazolidin-2-ylidene) Phosphoramidate linkage
  modified_base order(2..26,27..31): mod_base = OTHER; note = Phosphorothioate linkage
  modified_base 26^27: mod_base = OTHER; note = Methylphosphonate linkage
  misc_feature 1..32: note = RM109393

SEQ ID NO: 619 - DNA, 32 bp, synthetic construct; identical to SEQ ID NO: 187
  source 1..32: mol_type = other DNA
  misc_feature 22..23: note = DNA
  misc_feature order(1..21,24..32): note = RNA
  modified_base 21: mod_base = OTHER; note = 2-Prime-O-Methoxyethyl modified 5-methyl Cytidine
  modified_base 22: mod_base = OTHER; note = DNA nucleotide carrying a 6-amino-5-nitro-3-yl-2(1H)-pyridone nucleobase
  modified_base 23: mod_base = OTHER; note = DNA nucleotide carrying a hypoxanthine nucleobase
  modified_base order(13,16,18..19,25..26): mod_base = OTHER; note = 2-Prime-Fluoro modified nucleoside
  modified_base order(1..12,14..15,17,20,24,27..32): mod_base = OTHER; note = 2-Prime-O-Methyl modified nucleoside
  modified_base order(1^2,31^32): mod_base = OTHER; note = (1,3-dimethylimidazolidin-2-ylidene) Phosphoramidate linkage
  modified_base order(2..23,24..31): mod_base = OTHER; note = Phosphorothioate linkage
  modified_base 23^24: mod_base = OTHER; note = Methylphosphonate linkage
  misc_feature 1..32: note = RM109394

SEQ ID NO: 620 - DNA, 32 bp, synthetic construct; identical to SEQ ID NO: 5
  source 1..32: mol_type = other DNA
  misc_feature 19..20: note = DNA
  misc_feature order(1..18,21..32): note = RNA
  modified_base 18: mod_base = OTHER; note = 2-Prime-O-Methoxyethyl modified 5-methyl Cytidine
  modified_base 19: mod_base = OTHER; note = DNA nucleotide carrying a 6-amino-5-nitro-3-yl-2(1H)-pyridone nucleobase
  modified_base 20: mod_base = OTHER; note = DNA nucleotide carrying a hypoxanthine nucleobase
  modified_base order(10,13,15..16,22..23): mod_base = OTHER; note = 2-Prime-Fluoro modified nucleoside
  modified_base order(1..9,11..12,14,17,21,24..32): mod_base = OTHER; note = 2-Prime-O-Methyl modified nucleoside
  modified_base order(1^2,31^32): mod_base = OTHER; note = (1,3-dimethylimidazolidin-2-ylidene) Phosphoramidate linkage
  modified_base order(2..20,21..31): mod_base = OTHER; note = Phosphorothioate linkage
  modified_base 20^21: mod_base = OTHER; note = Methylphosphonate linkage
  misc_feature 1..32: note = RM109395

SEQ ID NO: 621 - DNA, 32 bp, synthetic construct; identical to SEQ ID NO: 189
  source 1..32: mol_type = other DNA
  misc_feature 16..17: note = DNA
  misc_feature order(1..15,18..32): note = RNA
  modified_base 15: mod_base = OTHER; note = 2-Prime-O-Methoxyethyl modified 5-methyl Cytidine
  modified_base 16: mod_base = OTHER; note = DNA nucleotide carrying a 6-amino-5-nitro-3-yl-2(1H)-pyridone nucleobase
  modified_base 17: mod_base = OTHER; note = DNA nucleotide carrying a hypoxanthine nucleobase
  modified_base order(7,10,12..13,19..20): mod_base = OTHER; note = 2-Prime-Fluoro modified nucleoside
  modified_base order(1..6,8..9,11,14,18,21..32): mod_base = OTHER; note = 2-Prime-O-Methyl modified nucleoside
  modified_base order(1^2,31^32): mod_base = OTHER; note = (1,3-dimethylimidazolidin-2-ylidene) Phosphoramidate linkage
  modified_base order(2..17,18..31): mod_base = OTHER; note = Phosphorothioate linkage
  modified_base 17^18: mod_base = OTHER; note = Methylphosphonate linkage
  misc_feature 1..32: note = RM109396

SEQ ID NO: 622 - DNA, 32 bp, synthetic construct; identical to SEQ ID NO: 190
  source 1..32: mol_type = other DNA
  misc_feature 13..14: note = DNA
  misc_feature order(1..12,15..32): note = RNA
  modified_base 12: mod_base = OTHER; note = 2-Prime-O-Methoxyethyl modified 5-methyl Cytidine
  modified_base 13: mod_base = OTHER; note = DNA nucleotide carrying a 6-amino-5-nitro-3-yl-2(1H)-pyridone nucleobase
  modified_base 14: mod_base = OTHER; note = DNA nucleotide carrying a hypoxanthine nucleobase
  modified_base order(4,7,9..10,16..17): mod_base = OTHER; note = 2-Prime-Fluoro modified nucleoside
  modified_base order(1..3,5..6,8,11,15,18..32): mod_base = OTHER; note = 2-Prime-O-Methyl modified nucleoside
  modified_base order(1^2,31^32): mod_base = OTHER; note = (1,3-dimethylimidazolidin-2-ylidene) Phosphoramidate linkage
  modified_base order(2..14,15..31): mod_base = OTHER; note = Phosphorothioate linkage
  modified_base 14^15: mod_base = OTHER; note = Methylphosphonate linkage
  misc_feature 1..32: note = RM109397

SEQ ID NO: 623 - DNA, 32 bp, synthetic construct; identical to SEQ ID NO: 191
  source 1..32: mol_type = other DNA
  misc_feature 10..11: note = DNA
  misc_feature order(1..9,12..32): note = RNA
  modified_base 9: mod_base = OTHER; note = 2-Prime-O-Methoxyethyl modified 5-methyl Cytidine
  modified_base 10: mod_base = OTHER; note = DNA nucleotide carrying a 6-amino-5-nitro-3-yl-2(1H)-pyridone nucleobase
  modified_base 11: mod_base = OTHER; note = DNA nucleotide carrying a hypoxanthine nucleobase
  modified_base order(1,4,6..7,13..14): mod_base = OTHER; note = 2-Prime-Fluoro modified nucleoside
  modified_base order(2..3,5,8,12,15..32): mod_base = OTHER; note = 2-Prime-O-Methyl modified nucleoside
  modified_base order(1^2,31^32): mod_base = OTHER; note = (1,3-dimethylimidazolidin-2-ylidene) Phosphoramidate linkage
  modified_base order(2..11,12..31): mod_base = OTHER; note = Phosphorothioate linkage
  modified_base 11^12: mod_base = OTHER; note = Methylphosphonate linkage
  misc_feature 1..32: note = RM109398

SEQ ID NO: 624 - DNA, 23 bp, synthetic construct
  source 1..23: mol_type = other DNA
  misc_feature 12..13: note = DNA
  misc_feature order(1..11,14..23): note = RNA
  modified_base 11: mod_base = OTHER; note = 2-Prime-O-Methoxyethyl modified 5-methyl Cytidine
  modified_base 12: mod_base = OTHER; note = DNA nucleotide carrying a 6-amino-5-nitro-3-yl-2(1H)-pyridone nucleobase
  modified_base 13: mod_base = OTHER; note = DNA nucleotide carrying a hypoxanthine nucleobase
  modified_base order(10,15,17..18,20,23): mod_base = OTHER; note = 2-Prime-Fluoro modified nucleoside
  modified_base order(1..9,14,16,19,21..22): mod_base = OTHER; note = 2-Prime-O-Methyl modified nucleoside
  modified_base order(1^2,22^23): mod_base = OTHER; note = (1,3-dimethylimidazolidin-2-ylidene) Phosphoramidate linkage
  modified_base order(2..13,14..22): mod_base = OTHER; note = Phosphorothioate linkage
  modified_base 13^14: mod_base = OTHER; note = Methylphosphonate linkage
  misc_feature 1..23: note = RM109399
tgatgccatacnntgccaccagg

SEQ ID NO: 625 - DNA, 23 bp, synthetic construct
  source 1..23: mol_type = other DNA
  misc_feature 9..10: note = DNA
  misc_feature order(1..8,11..23): note = RNA
  modified_base 8: mod_base = OTHER; note = 2-Prime-O-Methoxyethyl modified 5-methyl Cytidine
  modified_base 9: mod_base = OTHER; note = DNA nucleotide carrying a 6-amino-5-nitro-3-yl-2(1H)-pyridone nucleobase
  modified_base 10: mod_base = OTHER; note = DNA nucleotide carrying a hypoxanthine nucleobase
  modified_base order(7,12,14..15,17,20): mod_base = OTHER; note = 2-Prime-Fluoro modified nucleoside
  modified_base order(1..6,11,13,16,18..19,21..23): mod_base = OTHER; note = 2-Prime-O-Methyl modified nucleoside
  modified_base order(1^2,22^23): mod_base = OTHER; note = (1,3-dimethylimidazolidin-2-ylidene) Phosphoramidate linkage
  modified_base order(2..10,11..22): mod_base = OTHER; note = Phosphorothioate linkage
  modified_base 10^11: mod_base = OTHER; note = Methylphosphonate linkage
  misc_feature 1..23: note = RM109400
tgccatacnntgccaccagggcg

SEQ ID NO: 626 - DNA, 23 bp, synthetic construct
  source 1..23: mol_type = other DNA
  misc_feature 6..7: note = DNA
  misc_feature order(1..5,8..23): note = RNA
  modified_base 5: mod_base = OTHER; note = 2-Prime-O-Methoxyethyl modified 5-methyl Cytidine
  modified_base 6: mod_base = OTHER; note = DNA nucleotide carrying a 6-amino-5-nitro-3-yl-2(1H)-pyridone nucleobase
  modified_base 7: mod_base = OTHER; note = DNA nucleotide carrying a hypoxanthine nucleobase
  modified_base order(4,9,11..12,14,17): mod_base = OTHER; note = 2-Prime-Fluoro modified nucleoside
  modified_base order(1..3,8,10,13,15..16,18..23): mod_base = OTHER; note = 2-Prime-O-Methyl modified nucleoside
  modified_base order(1^2,22^23): mod_base = OTHER; note = (1,3-dimethylimidazolidin-2-ylidene) Phosphoramidate linkage
  modified_base order(2..7,8..22): mod_base = OTHER; note = Phosphorothioate linkage
  modified_base 7^8: mod_base = OTHER; note = Methylphosphonate linkage
  misc_feature 1..23: note = RM109401
catacnntgccaccagggcgatg

SEQ ID NO: 627 - DNA, 32 bp, synthetic construct; identical to SEQ ID NO: 5
  source 1..32: mol_type = other DNA
  misc_feature 19..20: note = DNA
  misc_feature order(1..18,21..32): note = RNA
  modified_base 18: mod_base = OTHER; note = 2-Prime-O-Methoxyethyl modified 5-methyl Cytidine
  modified_base 19: mod_base = OTHER; note = DNA nucleotide carrying a 6-amino-5-nitro-3-yl-2(1H)-pyridone nucleobase
  modified_base 20: mod_base = OTHER; note = DNA nucleotide carrying a hypoxanthine nucleobase
  modified_base order(17,22,24..25,27,30): mod_base = OTHER; note = 2-Prime-Fluoro modified nucleoside
  modified_base order(1..16,21,23,26,28..29,31..32): mod_base = OTHER; note = 2-Prime-O-Methyl modified nucleoside
  modified_base order(1^2,31^32): mod_base = OTHER; note = (1,3-dimethylimidazolidin-2-ylidene) Phosphoramidate linkage
  modified_base order(2..20,21..31): mod_base = OTHER; note = Phosphorothioate linkage
  modified_base 20^21: mod_base = OTHER; note = Methylphosphonate linkage
  misc_feature 1..32: note = RM109402

SEQ ID NO: 628 - DNA, 32 bp, synthetic construct; identical to SEQ ID NO: 189
  source 1..32: mol_type = other DNA
  misc_feature 16..17: note = DNA
  misc_feature order(1..15,18..32): note = RNA
  modified_base 15: mod_base = OTHER; note = 2-Prime-O-Methoxyethyl modified 5-methyl Cytidine
  modified_base 16: mod_base = OTHER; note = DNA nucleotide carrying a 6-amino-5-nitro-3-yl-2(1H)-pyridone nucleobase
  modified_base 17: mod_base = OTHER; note = DNA nucleotide carrying a hypoxanthine nucleobase
  modified_base order(14,19,21..22,24,27): mod_base = OTHER; note = 2-Prime-Fluoro modified nucleoside
  modified_base order(1..13,18,20,23,25..26,28..32): mod_base = OTHER; note = 2-Prime-O-Methyl modified nucleoside
  modified_base order(1^2,31^32): mod_base = OTHER; note = (1,3-dimethylimidazolidin-2-ylidene) Phosphoramidate linkage
  modified_base order(2..17,18..31): mod_base = OTHER; note = Phosphorothioate linkage
  modified_base 17^18: mod_base = OTHER; note = Methylphosphonate linkage
  misc_feature 1..32: note = RM109403

SEQ ID NO: 629 - DNA, 32 bp, synthetic construct; identical to SEQ ID NO: 190
  source 1..32: mol_type = other DNA
  misc_feature 13..14: note = DNA
  misc_feature order(1..12,15..32): note = RNA
  modified_base 12: mod_base = OTHER; note = 2-Prime-O-Methoxyethyl modified 5-methyl Cytidine
  modified_base 13: mod_base = OTHER; note = DNA nucleotide carrying a 6-amino-5-nitro-3-yl-2(1H)-pyridone nucleobase
  modified_base 14: mod_base = OTHER; note = DNA nucleotide carrying a hypoxanthine nucleobase
  modified_base order(11,16,18..19,21,24): mod_base = OTHER; note = 2-Prime-Fluoro modified nucleoside
  modified_base order(1..10,15,17,20,22..23,25..32): mod_base = OTHER; note = 2-Prime-O-Methyl modified nucleoside
  modified_base order(1^2,31^32): mod_base = OTHER; note = (1,3-dimethylimidazolidin-2-ylidene) Phosphoramidate linkage
  modified_base order(2..14,15..31): mod_base = OTHER; note = Phosphorothioate linkage
  modified_base 14^15: mod_base = OTHER; note = Methylphosphonate linkage
  misc_feature 1..32: note = RM109404

SEQ ID NO: 630 - DNA, 32 bp, synthetic construct; identical to SEQ ID NO: 191
  source 1..32: mol_type = other DNA
  misc_feature 10..11: note = DNA
  misc_feature order(1..9,12..32): note = RNA
  modified_base 9: mod_base = OTHER; note = 2-Prime-O-Methoxyethyl modified 5-methyl Cytidine
  modified_base 10: mod_base = OTHER; note = DNA nucleotide carrying a 6-amino-5-nitro-3-yl-2(1H)-pyridone nucleobase
  modified_base 11: mod_base = OTHER; note = DNA nucleotide carrying a hypoxanthine nucleobase
  modified_base order(8,13,15..16,18,21): mod_base = OTHER; note = 2-Prime-Fluoro modified nucleoside
  modified_base order(1..7,12,14,17,19..20,22..32): mod_base = OTHER; note = 2-Prime-O-Methyl modified nucleoside
  modified_base order(1^2,31^32): mod_base = OTHER; note = (1,3-dimethylimidazolidin-2-ylidene) Phosphoramidate linkage
  modified_base order(2..11,12..31): mod_base = OTHER; note = Phosphorothioate linkage
  modified_base 11^12: mod_base = OTHER; note = Methylphosphonate linkage
  misc_feature 1..32: note = RM109405

SEQ ID NO: 631 - DNA, 32 bp, synthetic construct; identical to SEQ ID NO: 192
  source 1..32: mol_type = other DNA
  misc_feature 7..8: note = DNA
  misc_feature order(1..6,9..32): note = RNA
  modified_base 6: mod_base = OTHER; note = 2-Prime-O-Methoxyethyl modified 5-methyl Cytidine
  modified_base 7: mod_base = OTHER; note = DNA nucleotide carrying a 6-amino-5-nitro-3-yl-2(1H)-pyridone nucleobase
  modified_base 8: mod_base = OTHER; note = DNA nucleotide carrying a hypoxanthine nucleobase
  modified_base order(5,10,12..13,15,18): mod_base = OTHER; note = 2-Prime-Fluoro modified nucleoside
  modified_base order(1..4,9,11,14,16..17,19..32): mod_base = OTHER; note = 2-Prime-O-Methyl modified nucleoside
  modified_base order(1^2,31^32): mod_base = OTHER; note = (1,3-dimethylimidazolidin-2-ylidene) Phosphoramidate linkage
  modified_base order(2..8,9..31): mod_base = OTHER; note = Phosphorothioate linkage
  modified_base 8^9: mod_base = OTHER; note = Methylphosphonate linkage
  misc_feature 1..32: note = RM109406

SEQ ID NO: 632 - DNA, 32 bp, synthetic construct; identical to SEQ ID NO: 5
  source 1..32: mol_type = other DNA
  misc_feature 19..20: note = DNA
  misc_feature order(1..18,21..32): note = RNA
  modified_base 18: mod_base = OTHER; note = 2-Prime-O-Methoxyethyl modified 5-methyl Cytidine
  modified_base 19: mod_base = OTHER; note = DNA nucleotide carrying a 6-amino-5-nitro-3-yl-2(1H)-pyridone nucleobase
  modified_base 20: mod_base = OTHER; note = DNA nucleotide carrying a hypoxanthine nucleobase
  modified_base order(1,4,7,22..23,31): mod_base = OTHER; note = 2-Prime-Fluoro modified nucleoside
  modified_base order(2..3,5..6,8..17,21,24..30,32): mod_base = OTHER; note = 2-Prime-O-Methyl modified nucleoside
  modified_base order(1^2,31^32): mod_base = OTHER; note = (1,3-dimethylimidazolidin-2-ylidene) Phosphoramidate linkage
  modified_base order(2..20,21..31): mod_base = OTHER; note = Phosphorothioate linkage
  modified_base 20^21: mod_base = OTHER; note = Methylphosphonate linkage
  misc_feature 1..32: note = RM109407

SEQ ID NO: 633 - DNA, 23 bp, synthetic construct
  source 1..23: mol_type = other DNA
  misc_feature 18..19: note = DNA
  misc_feature order(1..17,20..23): note = RNA
  modified_base 17: mod_base = OTHER; note = 2-Prime-O-Methoxyethyl modified 5-methyl Cytidine
  modified_base 18: mod_base = OTHER; note = DNA nucleotide carrying a 6-amino-5-nitro-3-yl-2(1H)-pyridone nucleobase
  modified_base 19: mod_base = OTHER; note = DNA nucleotide carrying a hypoxanthine nucleobase
  modified_base order(3,6,21..22): mod_base = OTHER; note = 2-Prime-Fluoro modified nucleoside
  modified_base order(1..2,4..5,7..16,20,23): mod_base = OTHER; note = 2-Prime-O-Methyl modified nucleoside
  modified_base order(1^2,22^23): mod_base = OTHER; note = (1,3-dimethylimidazolidin-2-ylidene) Phosphoramidate linkage
  modified_base order(2..19,20..22): mod_base = OTHER; note = Phosphorothioate linkage
  modified_base 19^20: mod_base = OTHER; note = Methylphosphonate linkage
  misc_feature 1..23: note = RM109408
ggggcatgatgccatacnntgcc

SEQ ID NO: 634 - DNA, 23 bp, synthetic construct
  source 1..23: mol_type = other DNA
  misc_feature 6..7: note = DNA
  misc_feature order(1..5,8..23): note = RNA
  modified_base 5: mod_base = OTHER; note = 2-Prime-O-Methoxyethyl modified 5-methyl Cytidine
  modified_base 6: mod_base = OTHER; note = DNA nucleotide carrying a 6-amino-5-nitro-3-yl-2(1H)-pyridone nucleobase
  modified_base 7: mod_base = OTHER; note = DNA nucleotide carrying a hypoxanthine nucleobase
  modified_base order(4,9,20,23): mod_base = OTHER; note = 2-Prime-Fluoro modified nucleoside
  modified_base order(1..3,8,10..19,21..22): mod_base = OTHER; note = 2-Prime-O-Methyl modified nucleoside
  modified_base order(1^2,22^23): mod_base = OTHER; note = (1,3-dimethylimidazolidin-2-ylidene) Phosphoramidate linkage
  modified_base order(2..7,8..22): mod_base = OTHER; note = Phosphorothioate linkage
  modified_base 7^8: mod_base = OTHER; note = Methylphosphonate linkage
  misc_feature 1..23: note = RM109409
catacnntgccaccagggcgatg

SEQ ID NO: 635 - DNA, 32 bp, synthetic construct; identical to SEQ ID NO: 187
  source 1..32: mol_type = other DNA
  misc_feature 22..23: note = DNA
  misc_feature order(1..21,24..32): note = RNA
  modified_base 21: mod_base = OTHER; note = 2-Prime-O-Methoxyethyl modified 5-methyl Cytidine
  modified_base 22: mod_base = OTHER; note = DNA nucleotide carrying a 6-amino-5-nitro-3-yl-2(1H)-pyridone nucleobase
  modified_base 23: mod_base = OTHER; note = DNA nucleotide carrying a hypoxanthine nucleobase
  modified_base order(12,15,18,20,25,27,29,31..32): mod_base = OTHER; note = 2-Prime-Fluoro modified nucleoside
  modified_base order(1..11,13..14,16..17,19,24,26,28,30): mod_base = OTHER; note = 2-Prime-O-Methyl modified nucleoside
  modified_base order(1^2,31^32): mod_base = OTHER; note = (1,3-dimethylimidazolidin-2-ylidene) Phosphoramidate linkage
  modified_base order(2..23,24..31): mod_base = OTHER; note = Phosphorothioate linkage
  modified_base 23^24: mod_base = OTHER; note = Methylphosphonate linkage
  misc_feature 1..32: note = RM109410

SEQ ID NO: 636 - DNA, 32 bp, synthetic construct; identical to SEQ ID NO: 5
  source 1..32: mol_type = other DNA
  misc_feature 19..20: note = DNA
  misc_feature order(1..18,21..32): note = RNA
  modified_base 18: mod_base = OTHER; note = 2-Prime-O-Methoxyethyl modified 5-methyl Cytidine
  modified_base 19: mod_base = OTHER; note = DNA nucleotide carrying a 6-amino-5-nitro-3-yl-2(1H)-pyridone nucleobase
  modified_base 20: mod_base = OTHER; note = DNA nucleotide carrying a hypoxanthine nucleobase
  modified_base order(9,12,15,17,22,24,26,28..29): mod_base = OTHER; note = 2-Prime-Fluoro modified nucleoside
  modified_base order(1..8,10..11,13..14,16,21,23,25,27,30..32): mod_base = OTHER; note = 2-Prime-O-Methyl modified nucleoside
  modified_base order(1^2,31^32): mod_base = OTHER; note = (1,3-dimethylimidazolidin-2-ylidene) Phosphoramidate linkage
  modified_base order(2..20,21..31): mod_base = OTHER; note = Phosphorothioate linkage
  modified_base 20^21: mod_base = OTHER; note = Methylphosphonate linkage
  misc_feature 1..32: note = RM109411

SEQ ID NO: 637 - DNA, 32 bp, synthetic construct; identical to SEQ ID NO: 189
  source 1..32: mol_type = other DNA
  misc_feature 16..17: note = DNA
  misc_feature order(1..15,18..32): note = RNA
  modified_base 15: mod_base = OTHER; note = 2-Prime-O-Methoxyethyl modified 5-methyl Cytidine
  modified_base 16: mod_base = OTHER; note = DNA nucleotide carrying a 6-amino-5-nitro-3-yl-2(1H)-pyridone nucleobase
  modified_base 17: mod_base = OTHER; note = DNA nucleotide carrying a hypoxanthine nucleobase
  modified_base order(6,9,12,14,19,21,23,25..26): mod_base = OTHER; note = 2-Prime-Fluoro modified nucleoside
  modified_base order(1..5,7..8,10..11,13,18,20,22,24,27..32): mod_base = OTHER; note = 2-Prime-O-Methyl modified nucleoside
  modified_base order(1^2,31^32): mod_base = OTHER; note = (1,3-dimethylimidazolidin-2-ylidene) Phosphoramidate linkage
  modified_base order(2..17,18..31): mod_base = OTHER; note = Phosphorothioate linkage
  modified_base 17^18: mod_base = OTHER; note = Methylphosphonate linkage
  misc_feature 1..32: note = RM109412

SEQ ID NO: 638 - DNA, 32 bp, synthetic construct; identical to SEQ ID NO: 190
  source 1..32: mol_type = other DNA
  misc_feature 13..14: note = DNA
  misc_feature order(1..12,15..32): note = RNA
  modified_base 12: mod_base = OTHER; note = 2-Prime-O-Methoxyethyl modified 5-methyl Cytidine
  modified_base 13: mod_base = OTHER; note = DNA nucleotide carrying a 6-amino-5-nitro-3-yl-2(1H)-pyridone nucleobase
  modified_base 14: mod_base = OTHER; note = DNA nucleotide carrying a hypoxanthine nucleobase
  modified_base order(3,6,9,11,16,18,20,22..23): mod_base = OTHER; note = 2-Prime-Fluoro modified nucleoside
  modified_base order(1..2,4..5,7..8,10,15,17,19,21,24..32): mod_base = OTHER; note = 2-Prime-O-Methyl modified nucleoside
  modified_base order(1^2,31^32): mod_base = OTHER; note = (1,3-dimethylimidazolidin-2-ylidene) Phosphoramidate linkage
  modified_base order(2..14,15..31): mod_base = OTHER; note = Phosphorothioate linkage
  modified_base 14^15: mod_base = OTHER; note = Methylphosphonate linkage
  misc_feature 1..32: note = RM109413

SEQ ID NO: 639 - DNA, 32 bp, synthetic construct; identical to SEQ ID NO: 5
  source 1..32: mol_type = other DNA
  misc_feature 19..20: note = DNA
  misc_feature order(1..18,21..32): note = RNA
  modified_base 18: mod_base = OTHER; note = 2-Prime-O-Methoxyethyl modified 5-methyl Cytidine
  modified_base 19: mod_base = OTHER; note = DNA nucleotide carrying a 6-amino-5-nitro-3-yl-2(1H)-pyridone nucleobase
  modified_base 20: mod_base = OTHER; note = DNA nucleotide carrying a hypoxanthine nucleobase
  modified_base order(11..12,14,16,22..23,25,28,31): mod_base = OTHER; note = 2-Prime-Fluoro modified nucleoside
  modified_base order(1..10,13,15,17,21,24,26..27,29..30,32): mod_base = OTHER; note = 2-Prime-O-Methyl modified nucleoside
  modified_base order(1^2,31^32): mod_base = OTHER; note = (1,3-dimethylimidazolidin-2-ylidene) Phosphoramidate linkage
  modified_base order(2..20,21..31): mod_base = OTHER; note = Phosphorothioate linkage
  modified_base 20^21: mod_base = OTHER; note = Methylphosphonate linkage
  misc_feature 1..32: note = RM109414

SEQ ID NO: 640 - DNA, 32 bp, synthetic construct; identical to SEQ ID NO: 189
  source 1..32: mol_type = other DNA
  misc_feature 16..17: note = DNA
  misc_feature order(1..15,18..32): note = RNA
  modified_base 15: mod_base = OTHER; note = 2-Prime-O-Methoxyethyl modified 5-methyl Cytidine
  modified_base 16: mod_base = OTHER; note = DNA nucleotide carrying a 6-amino-5-nitro-3-yl-2(1H)-pyridone nucleobase
  modified_base 17: mod_base = OTHER; note = DNA nucleotide carrying a hypoxanthine nucleobase
  modified_base order(8..9,11,13,19..20,22,25,28): mod_base = OTHER; note = 2-Prime-Fluoro modified nucleoside
  modified_base order(1..7,10,12,14,18,21,23..24,26..27,29..32): mod_base = OTHER; note = 2-Prime-O-Methyl modified nucleoside
  modified_base order(1^2,31^32): mod_base = OTHER; note = (1,3-dimethylimidazolidin-2-ylidene) Phosphoramidate linkage
  modified_base order(2..17,18..31): mod_base = OTHER; note = Phosphorothioate linkage
  modified_base 17^18: mod_base = OTHER; note = Methylphosphonate linkage
  misc_feature 1..32: note = RM109415

SEQ ID NO: 641 - DNA, 32 bp, synthetic construct; identical to SEQ ID NO: 190
  source 1..32: mol_type = other DNA
  misc_feature 13..14: note = DNA
  misc_feature order(1..12,15..32): note = RNA
  modified_base 12: mod_base = OTHER; note = 2-Prime-O-Methoxyethyl modified 5-methyl Cytidine
  modified_base 13: mod_base = OTHER; note = DNA nucleotide carrying a 6-amino-5-nitro-3-yl-2(1H)-pyridone nucleobase
  modified_base 14: mod_base = OTHER; note = DNA nucleotide carrying a hypoxanthine nucleobase
  modified_base order(5..6,8,10,16..17,19,22,25): mod_base = OTHER; note = 2-Prime-Fluoro modified nucleoside
  modified_base order(1..4,7,9,11,15,18,20..21,23..24,26..32): mod_base = OTHER; note = 2-Prime-O-Methyl modified nucleoside
  modified_base order(1^2,31^32): mod_base = OTHER; note = (1,3-dimethylimidazolidin-2-ylidene) Phosphoramidate linkage
  modified_base order(2..14,15..31): mod_base = OTHER; note = Phosphorothioate linkage
  modified_base 14^15: mod_base = OTHER; note = Methylphosphonate linkage
  misc_feature 1..32: note = RM109416

SEQ ID NO: 642 - DNA, 32 bp, synthetic construct; identical to SEQ ID NO: 191
  source 1..32: mol_type = other DNA
  misc_feature 10..11: note = DNA
  misc_feature order(1..9,12..32): note = RNA
  modified_base 9: mod_base = OTHER; note = 2-Prime-O-Methoxyethyl modified 5-methyl Cytidine
  modified_base 10: mod_base = OTHER; note = DNA nucleotide carrying a 6-amino-5-nitro-3-yl-2(1H)-pyridone nucleobase
  modified_base 11: mod_base = OTHER; note = DNA nucleotide carrying a hypoxanthine nucleobase
  modified_base order(2..3,5,7,13..14,16,19,22): mod_base = OTHER; note = 2-Prime-Fluoro modified nucleoside
  modified_base order(1,4,6,8,12,15,17..18,20..21,23..32): mod_base = OTHER; note = 2-Prime-O-Methyl modified nucleoside
  modified_base order(1^2,31^32): mod_base = OTHER; note = (1,3-dimethylimidazolidin-2-ylidene) Phosphoramidate linkage
  modified_base order(2..11,12..31): mod_base = OTHER; note = Phosphorothioate linkage
  modified_base 11^12: mod_base = OTHER; note = Methylphosphonate linkage
  misc_feature 1..32: note = RM109417

SEQ ID NO: 643 - DNA, 23 bp, synthetic construct
  source 1..23: mol_type = other DNA
  misc_feature 15..16: note = DNA
  misc_feature order(1..14,17..23): note = RNA
  modified_base 14: mod_base = OTHER; note = 2-Prime-O-Methoxyethyl modified 5-methyl Cytidine
  modified_base 15: mod_base = OTHER; note = DNA nucleotide carrying a 6-amino-5-nitro-3-yl-2(1H)-pyridone nucleobase
  modified_base 16: mod_base = OTHER; note = DNA nucleotide carrying a hypoxanthine nucleobase
  modified_base order(8,11,13,18,20,22): mod_base = OTHER; note = 2-Prime-Fluoro modified nucleoside
  modified_base order(1..7,9..10,12,17,19,21,23): mod_base = OTHER; note = 2-Prime-O-Methyl modified nucleoside
  modified_base order(1^2,22^23): mod_base = OTHER; note = (1,3-dimethylimidazolidin-2-ylidene) Phosphoramidate linkage
  modified_base order(2..16,17..22): mod_base = OTHER; note = Phosphorothioate linkage
  modified_base 16^17: mod_base = OTHER; note = Methylphosphonate linkage
  misc_feature 1..23: note = RM109418
gcatgatgccatacnntgccacc

SEQ ID NO: 644 - DNA, 23 bp, synthetic construct
  source 1..23: mol_type = other DNA
  misc_feature 12..13: note = DNA
  misc_feature order(1..11,14..23): note = RNA
  modified_base 11: mod_base = OTHER; note = 2-Prime-O-Methoxyethyl modified 5-methyl Cytidine
  modified_base 12: mod_base = OTHER; note = DNA nucleotide carrying a 6-amino-5-nitro-3-yl-2(1H)-pyridone nucleobase
  modified_base 13: mod_base = OTHER; note = DNA nucleotide carrying a hypoxanthine nucleobase
  modified_base order(5,8,10,15,17,19): mod_base = OTHER; note = 2-Prime-Fluoro modified nucleoside
  modified_base order(1..4,6..7,9,14,16,18,20..23): mod_base = OTHER; note = 2-Prime-O-Methyl modified nucleoside
  modified_base order(1^2,22^23): mod_base = OTHER; note = (1,3-dimethylimidazolidin-2-ylidene) Phosphoramidate linkage
  modified_base order(2..13,14..22): mod_base = OTHER; note = Phosphorothioate linkage
  modified_base 13^14: mod_base = OTHER; note = Methylphosphonate linkage
  misc_feature 1..23: note = RM109419
tgatgccatacnntgccaccagg

SEQ ID NO: 645 - DNA, 23 bp, synthetic construct
  source 1..23: mol_type = other DNA
  misc_feature 9..10: note = DNA
  misc_feature order(1..8,11..23): note = RNA
  modified_base 8: mod_base = OTHER; note = 2-Prime-O-Methoxyethyl modified 5-methyl Cytidine
  modified_base 9: mod_base = OTHER; note = DNA nucleotide carrying a 6-amino-5-nitro-3-yl-2(1H)-pyridone nucleobase
  modified_base 10: mod_base = OTHER; note = DNA nucleotide carrying a hypoxanthine nucleobase
  modified_base order(2,5,7,12,14,16): mod_base = OTHER; note = 2-Prime-Fluoro modified nucleoside
  modified_base order(1,3..4,6,11,13,15,17..23): mod_base = OTHER; note = 2-Prime-O-Methyl modified nucleoside
  modified_base order(1^2,22^23): mod_base = OTHER; note = (1,3-dimethylimidazolidin-2-ylidene) Phosphoramidate linkage
  modified_base order(2..10,11..22): mod_base = OTHER; note = Phosphorothioate linkage
  modified_base 10^11: mod_base = OTHER; note = Methylphosphonate linkage
  misc_feature 1..23: note = RM109420
tgccatacnntgccaccagggcg

SEQ ID NO: 646 - DNA, 32 bp, synthetic construct; identical to SEQ ID NO: 186
  source 1..32: mol_type = other DNA
  misc_feature 25..26: note = DNA
  misc_feature order(1..24,27..32): note = RNA
  modified_base 24: mod_base = OTHER; note = 2-Prime-O-Methoxyethyl modified 5-methyl Cytidine
  modified_base 25: mod_base = OTHER; note = DNA nucleotide carrying a 6-amino-5-nitro-3-yl-2(1H)-pyridone nucleobase
  modified_base 26: mod_base = OTHER; note = DNA nucleotide carrying a hypoxanthine nucleobase
  modified_base order(18,21,23,28,30,32): mod_base = OTHER; note = 2-Prime-Fluoro modified nucleoside
  modified_base order(1..17,19..20,22,27,29,31): mod_base = OTHER; note = 2-Prime-O-Methyl modified nucleoside
  modified_base order(1^2,31^32): mod_base = OTHER; note = (1,3-dimethylimidazolidin-2-ylidene) Phosphoramidate linkage
  modified_base order(2..26,27..31): mod_base = OTHER; note = Phosphorothioate linkage
  modified_base 26^27: mod_base = OTHER; note = Methylphosphonate linkage
  misc_feature 1..32: note = RM109421

SEQ ID NO: 647 - DNA, 32 bp, synthetic construct; identical to SEQ ID NO: 187
  source 1..32: mol_type = other DNA
  misc_feature 22..23: note = DNA
  misc_feature order(1..21,24..32): note = RNA
  modified_base 21: mod_base = OTHER; note = 2-Prime-O-Methoxyethyl modified 5-methyl Cytidine
  modified_base 22: mod_base = OTHER; note = DNA nucleotide carrying a 6-amino-5-nitro-3-yl-2(1H)-pyridone nucleobase
  modified_base 23: mod_base = OTHER; note = DNA nucleotide carrying a hypoxanthine nucleobase
  modified_base order(15,18,20,25,27,29): mod_base = OTHER; note = 2-Prime-Fluoro modified nucleoside
  modified_base order(1..14,16..17,19,24,26,28,30..32): mod_base = OTHER; note = 2-Prime-O-Methyl modified nucleoside
  modified_base order(1^2,31^32): mod_base = OTHER; note = (1,3-dimethylimidazolidin-2-ylidene) Phosphoramidate linkage
  modified_base order(2..23,24..31): mod_base = OTHER; note = Phosphorothioate linkage
  modified_base 23^24: mod_base = OTHER; note = Methylphosphonate linkage
  misc_feature 1..32: note = RM109422

SEQ ID NO: 648 - DNA, 32 bp, synthetic construct; identical to SEQ ID NO: 5
  source 1..32: mol_type = other DNA
  misc_feature 19..20: note = DNA
  misc_feature order(1..18,21..32): note = RNA
  modified_base 18: mod_base = OTHER; note = 2-Prime-O-Methoxyethyl modified 5-methyl Cytidine
  modified_base 19: mod_base = OTHER; note = DNA nucleotide carrying a 6-amino-5-nitro-3-yl-2(1H)-pyridone nucleobase
  modified_base 20: mod_base = OTHER; note = DNA nucleotide carrying a hypoxanthine nucleobase
  modified_base order(12,15,17,22,24,26): mod_base = OTHER; note = 2-Prime-Fluoro modified nucleoside
  modified_base order(1..11,13..14,16,21,23,25,27..32): mod_base = OTHER; note = 2-Prime-O-Methyl modified nucleoside
  modified_base order(1^2,31^32): mod_base = OTHER; note = (1,3-dimethylimidazolidin-2-ylidene) Phosphoramidate linkage
  modified_base order(2..20,21..31): mod_base = OTHER; note = Phosphorothioate linkage
  modified_base 20^21: mod_base = OTHER; note = Methylphosphonate linkage
  misc_feature 1..32: note = RM109423

SEQ ID NO: 649 - DNA, 32 bp, synthetic construct; identical to SEQ ID NO: 189
  source 1..32: mol_type = other DNA
  misc_feature 16..17: note = DNA
  misc_feature order(1..15,18..32): note = RNA
  modified_base 15: mod_base = OTHER; note = 2-Prime-O-Methoxyethyl modified 5-methyl Cytidine
  modified_base 16: mod_base = OTHER; note = DNA nucleotide carrying a 6-amino-5-nitro-3-yl-2(1H)-pyridone nucleobase
  modified_base 17: mod_base = OTHER; note = DNA nucleotide carrying a hypoxanthine nucleobase
  modified_base order(9,12,14,19,21,23): mod_base = OTHER; note = 2-Prime-Fluoro modified nucleoside
  modified_base order(1..8,10..11,13,18,20,22,24..32): mod_base = OTHER; note = 2-Prime-O-Methyl modified nucleoside
  modified_base order(1^2,31^32): mod_base = OTHER; note = (1,3-dimethylimidazolidin-2-ylidene) Phosphoramidate linkage
  modified_base order(2..17,18..31): mod_base = OTHER; note = Phosphorothioate linkage
  modified_base 17^18: mod_base = OTHER; note = Methylphosphonate linkage
  misc_feature 1..32: note = RM109424

SEQ ID NO: 650 - DNA, 32 bp, synthetic construct; identical to SEQ ID NO: 190
  source 1..32: mol_type = other DNA
  misc_feature 13..14: note = DNA
  misc_feature order(1..12,15..32): note = RNA
  modified_base 12: mod_base = OTHER; note = 2-Prime-O-Methoxyethyl modified 5-methyl Cytidine
  modified_base 13: mod_base = OTHER; note = DNA nucleotide carrying a 6-amino-5-nitro-3-yl-2(1H)-pyridone nucleobase
  modified_base 14: mod_base = OTHER; note = DNA nucleotide carrying a hypoxanthine nucleobase
  modified_base order(6,9,11,16,18,20): mod_base = OTHER; note = 2-Prime-Fluoro modified nucleoside
  modified_base order(1..5,7..8,10,15,17,19,21..32): mod_base = OTHER; note = 2-Prime-O-Methyl modified nucleoside
  modified_base order(1^2,31^32): mod_base = OTHER; note = (1,3-dimethylimidazolidin-2-ylidene) Phosphoramidate linkage
  modified_base order(2..14,15..31): mod_base = OTHER; note = Phosphorothioate linkage
  modified_base 14^15: mod_base = OTHER; note = Methylphosphonate linkage
  misc_feature 1..32: note = RM109425

SEQ ID NO: 651 - DNA, 32 bp, synthetic construct; identical to SEQ ID NO: 191
  source 1..32: mol_type = other DNA
  misc_feature 10..11: note = DNA
  misc_feature order(1..9,12..32): note = RNA
  modified_base 9: mod_base = OTHER; note = 2-Prime-O-Methoxyethyl modified 5-methyl Cytidine
  modified_base 10: mod_base = OTHER; note = DNA nucleotide carrying a 6-amino-5-nitro-3-yl-2(1H)-pyridone nucleobase
  modified_base 11: mod_base = OTHER; note = DNA nucleotide carrying a hypoxanthine nucleobase
  modified_base order(3,6,8,13,15,17): mod_base = OTHER; note = 2-Prime-Fluoro modified nucleoside
  modified_base order(1..2,4..5,7,12,14,16,18..32): mod_base = OTHER; note = 2-Prime-O-Methyl modified nucleoside
  modified_base order(1^2,31^32): mod_base = OTHER; note = (1,3-dimethylimidazolidin-2-ylidene) Phosphoramidate linkage
  modified_base order(2..11,12..31): mod_base = OTHER; note = Phosphorothioate linkage
  modified_base 11^12: mod_base = OTHER; note = Methylphosphonate linkage
  misc_feature 1..32: note = RM109426

SEQ ID NO: 652 - DNA, 23 bp, synthetic construct
  source 1..23: mol_type = other DNA
  misc_feature 12..13: note = DNA
  misc_feature order(1..11,14..23): note = RNA
  modified_base 11: mod_base = OTHER; note = 2-Prime-O-Methoxyethyl modified 5-methyl Cytidine
  modified_base 12: mod_base = OTHER; note = DNA nucleotide carrying a 6-amino-5-nitro-3-yl-2(1H)-pyridone nucleobase
  modified_base 13: mod_base = OTHER; note = DNA nucleotide carrying a hypoxanthine nucleobase
  modified_base order(7,9,15..16,18,21): mod_base = OTHER; note = 2-Prime-Fluoro modified nucleoside
  modified_base order(1..6,8,10,14,17,19..20,22..23): mod_base = OTHER; note = 2-Prime-O-Methyl modified nucleoside
  modified_base order(1^2,22^23): mod_base = OTHER; note = (1,3-dimethylimidazolidin-2-ylidene) Phosphoramidate linkage
  modified_base order(2..13,14..22): mod_base = OTHER; note = Phosphorothioate linkage
  modified_base 13^14: mod_base = OTHER; note = Methylphosphonate linkage
  misc_feature 1..23: note = RM109427
tgatgccatacnntgccaccagg

SEQ ID NO: 653 - DNA, 23 bp, synthetic construct
  source 1..23: mol_type = other DNA
  misc_feature 9..10: note = DNA
  misc_feature order(1..8,11..23): note = RNA
  modified_base 8: mod_base = OTHER; note = 2-Prime-O-Methoxyethyl modified 5-methyl Cytidine
  modified_base 9: mod_base = OTHER; note = DNA nucleotide carrying a 6-amino-5-nitro-3-yl-2(1H)-pyridone nucleobase
  modified_base 10: mod_base = OTHER; note = DNA nucleotide carrying a hypoxanthine nucleobase
  modified_base order(4,6,12..13,15,18): mod_base = OTHER; note = 2-Prime-Fluoro modified nucleoside
  modified_base order(1..3,5,7,11,14,16..17,19..23): mod_base = OTHER; note = 2-Prime-O-Methyl modified nucleoside
  modified_base order(1^2,22^23): mod_base = OTHER; note = (1,3-dimethylimidazolidin-2-ylidene) Phosphoramidate linkage
  modified_base order(2..10,11..22): mod_base = OTHER; note = Phosphorothioate linkage
  modified_base 10^11: mod_base = OTHER; note = Methylphosphonate linkage
  misc_feature 1..23: note = RM109428
tgccatacnntgccaccagggcg

SEQ ID NO: 654 - DNA, 23 bp, synthetic construct
  source 1..23: mol_type = other DNA
  misc_feature 6..7: note = DNA
  misc_feature order(1..5,8..23): note = RNA
  modified_base 5: mod_base = OTHER; note = 2-Prime-O-Methoxyethyl modified 5-methyl Cytidine
  modified_base 6: mod_base = OTHER; note = DNA nucleotide carrying a 6-amino-5-nitro-3-yl-2(1H)-pyridone nucleobase
  modified_base 7: mod_base = OTHER; note = DNA nucleotide carrying a hypoxanthine nucleobase
  modified_base order(1,3,9..10,12,15): mod_base = OTHER; note = 2-Prime-Fluoro modified nucleoside
  modified_base order(2,4,8,11,13..14,16..23): mod_base = OTHER; note = 2-Prime-O-Methyl modified nucleoside
  modified_base order(1^2,22^23): mod_base = OTHER; note = (1,3-dimethylimidazolidin-2-ylidene) Phosphoramidate linkage
  modified_base order(2..7,8..22): mod_base = OTHER; note = Phosphorothioate linkage
  modified_base 7^8: mod_base = OTHER; note = Methylphosphonate linkage
  misc_feature 1..23: note = RM109429
catacnntgccaccagggcgatg

SEQ ID NO: 655 - DNA, 32 bp, synthetic construct; identical to SEQ ID NO: 187
  source 1..32: mol_type = other DNA
  misc_feature 22..23: note = DNA
  misc_feature order(1..21,24..32): note = RNA
  modified_base 21: mod_base = OTHER; note = 2-Prime-O-Methoxyethyl modified 5-methyl Cytidine
  modified_base 22: mod_base = OTHER; note = DNA nucleotide carrying a 6-amino-5-nitro-3-yl-2(1H)-pyridone nucleobase
  modified_base 23: mod_base = OTHER; note = DNA nucleotide carrying a hypoxanthine nucleobase
  modified_base order(17,19,25..26,28,31): mod_base = OTHER; note = 2-Prime-Fluoro modified nucleoside
  modified_base order(1..16,18,20,24,27,29..30,32): mod_base = OTHER; note = 2-Prime-O-Methyl modified nucleoside
  modified_base order(1^2,31^32): mod_base = OTHER; note = (1,3-dimethylimidazolidin-2-ylidene) Phosphoramidate linkage
  modified_base order(2..23,24..31): mod_base = OTHER; note = Phosphorothioate linkage
  modified_base 23^24: mod_base = OTHER; note = Methylphosphonate linkage
  misc_feature 1..32: note = RM109430

SEQ ID NO: 656 - DNA, 32 bp, synthetic construct; identical to SEQ ID NO: 5
  source 1..32: mol_type = other DNA
  misc_feature 19..20: note = DNA
  misc_feature order(1..18,21..32): note = RNA
  modified_base 18: mod_base = OTHER; note = 2-Prime-O-Methoxyethyl modified 5-methyl Cytidine
  modified_base 19: mod_base = OTHER; note = DNA nucleotide carrying a 6-amino-5-nitro-3-yl-2(1H)-pyridone nucleobase
  modified_base 20: mod_base = OTHER; note = DNA nucleotide carrying a hypoxanthine nucleobase
  modified_base order(14,16,22..23,25,28): mod_base = OTHER; note = 2-Prime-Fluoro modified nucleoside
  modified_base order(1..13,15,17,21,24,26..27,29..32): mod_base = OTHER; note = 2-Prime-O-Methyl modified nucleoside
  modified_base order(1^2,31^32): mod_base = OTHER; note = (1,3-dimethylimidazolidin-2-ylidene) Phosphoramidate linkage
  modified_base order(2..20,21..31): mod_base = OTHER; note = Phosphorothioate linkage
  modified_base 20^21: mod_base = OTHER; note = Methylphosphonate linkage
  misc_feature 1..32: note = RM109431

SEQ ID NO: 657 - DNA, 32 bp, synthetic construct; identical to SEQ ID NO: 189
  source 1..32: mol_type = other DNA
  misc_feature 16..17: note = DNA
  misc_feature order(1..15,18..32): note = RNA
  modified_base 15: mod_base = OTHER; note = 2-Prime-O-Methoxyethyl modified 5-methyl Cytidine
  modified_base 16: mod_base = OTHER; note = DNA nucleotide carrying a 6-amino-5-nitro-3-yl-2(1H)-pyridone nucleobase
  modified_base 17: mod_base = OTHER; note = DNA nucleotide carrying a hypoxanthine nucleobase
  modified_base order(11,13,19..20,22,25): mod_base = OTHER; note = 2-Prime-Fluoro modified nucleoside
  modified_base order(1..10,12,14,18,21,23..24,26..32): mod_base = OTHER; note = 2-Prime-O-Methyl modified nucleoside
  modified_base order(1^2,31^32): mod_base = OTHER; note = (1,3-dimethylimidazolidin-2-ylidene) Phosphoramidate linkage
  modified_base order(2..17,18..31): mod_base = OTHER; note = Phosphorothioate linkage
  modified_base 17^18: mod_base = OTHER; note = Methylphosphonate linkage
  misc_feature 1..32: note = RM109432

SEQ ID NO: 658 - DNA, 32 bp, synthetic construct; identical to SEQ ID NO: 190
  source 1..32: mol_type = other DNA
  misc_feature 13..14: note = DNA
  misc_feature order(1..12,15..32): note = RNA
  modified_base 12: mod_base = OTHER; note = 2-Prime-O-Methoxyethyl modified 5-methyl Cytidine
  modified_base 13: mod_base = OTHER; note = DNA nucleotide carrying a 6-amino-5-nitro-3-yl-2(1H)-pyridone nucleobase
  modified_base 14: mod_base = OTHER; note = DNA nucleotide carrying a hypoxanthine nucleobase
  modified_base order(8,10,16..17,19,22): mod_base = OTHER; note = 2-Prime-Fluoro modified nucleoside
  modified_base order(1..7,9,11,15,18,20..21,23..32): mod_base = OTHER; note = 2-Prime-O-Methyl modified nucleoside
  modified_base order(1^2,31^32): mod_base = OTHER; note = (1,3-dimethylimidazolidin-2-ylidene) Phosphoramidate linkage
  modified_base order(2..14,15..31): mod_base = OTHER; note = Phosphorothioate linkage
  modified_base 14^15: mod_base = OTHER; note = Methylphosphonate linkage
  misc_feature 1..32: note = RM109433

SEQ ID NO: 659 - DNA, 32 bp, synthetic construct; identical to SEQ ID NO: 191
  source 1..32: mol_type = other DNA
  misc_feature 10..11: note = DNA
  misc_feature order(1..9,12..32): note = RNA
  modified_base 9: mod_base = OTHER; note = 2-Prime-O-Methoxyethyl modified 5-methyl Cytidine
  modified_base 10: mod_base = OTHER; note = DNA nucleotide carrying a 6-amino-5-nitro-3-yl-2(1H)-pyridone nucleobase
  modified_base 11: mod_base = OTHER; note = DNA nucleotide carrying a hypoxanthine nucleobase
  modified_base order(5,7,13..14,16,19): mod_base = OTHER; note = 2-Prime-Fluoro modified nucleoside
  modified_base order(1..4,6,8,12,15,17..18,20..32): mod_base = OTHER; note = 2-Prime-O-Methyl modified nucleoside
  modified_base order(1^2,31^32): mod_base = OTHER; note = (1,3-dimethylimidazolidin-2-ylidene) Phosphoramidate linkage
  modified_base order(2..11,12..31): mod_base = OTHER; note = Phosphorothioate linkage
  modified_base 11^12: mod_base = OTHER; note = Methylphosphonate linkage
  misc_feature 1..32: note = RM109434

SEQ ID NO: 660 - DNA, 32 bp, synthetic construct; identical to SEQ ID NO: 192
  source 1..32: mol_type = other DNA
  misc_feature 7..8: note = DNA
  misc_feature order(1..6,9..32): note = RNA
  modified_base 6: mod_base = OTHER; note = 2-Prime-O-Methoxyethyl modified 5-methyl Cytidine
  modified_base 7: mod_base = OTHER; note = DNA nucleotide carrying a 6-amino-5-nitro-3-yl-2(1H)-pyridone nucleobase
  modified_base 8: mod_base = OTHER; note = DNA nucleotide carrying a hypoxanthine nucleobase
  modified_base order(2,4,10..11,13,16): mod_base = OTHER; note = 2-Prime-Fluoro modified nucleoside
  modified_base order(1,3,5,9,12,14..15,17..32): mod_base = OTHER; note = 2-Prime-O-Methyl modified nucleoside
  modified_base order(1^2,31^32): mod_base = OTHER; note = (1,3-dimethylimidazolidin-2-ylidene) Phosphoramidate linkage
  modified_base order(2..8,9..31): mod_base = OTHER; note = Phosphorothioate linkage
  modified_base 8^9: mod_base = OTHER; note = Methylphosphonate linkage
  misc_feature 1..32: note = RM109435

SEQ ID NO: 661 - DNA, 32 bp, synthetic construct; identical to SEQ ID NO: 185
  source 1..32: mol_type = other DNA
  misc_feature 28..29: note = DNA
  misc_feature order(1..27,30..32): note = RNA
  modified_base 27: mod_base = OTHER; note = 2-Prime-O-Methoxyethyl modified 5-methyl Cytidine
  modified_base 28: mod_base = OTHER; note = DNA nucleotide carrying a 6-amino-5-nitro-3-yl-2(1H)-pyridone nucleobase
  modified_base 29: mod_base = OTHER; note = DNA nucleotide carrying a hypoxanthine nucleobase
  modified_base order(24,26,31): mod_base = OTHER; note = 2-Prime-Fluoro modified nucleoside
  modified_base order(1..23,25,30,32): mod_base = OTHER; note = 2-Prime-O-Methyl modified nucleoside
  modified_base order(1^2,31^32): mod_base = OTHER; note = (1,3-dimethylimidazolidin-2-ylidene) Phosphoramidate linkage
  modified_base order(2..29,30^31): mod_base = OTHER; note = Phosphorothioate linkage
  modified_base 29^30: mod_base = OTHER; note = Methylphosphonate linkage
  misc_feature 1..32: note = RM109436

SEQ ID NO: 662 - DNA, 32 bp, synthetic construct; identical to SEQ ID NO: 186
  source 1..32: mol_type = other DNA
  misc_feature 25..26: note = DNA
  misc_feature order(1..24,27..32): note = RNA
  modified_base 24: mod_base = OTHER; note = 2-Prime-O-Methoxyethyl modified 5-methyl Cytidine
  modified_base 25: mod_base = OTHER; note = DNA nucleotide carrying a 6-amino-5-nitro-3-yl-2(1H)-pyridone nucleobase
  modified_base 26: mod_base = OTHER; note = DNA nucleotide carrying a hypoxanthine nucleobase
  modified_base order(21,23,28): mod_base = OTHER; note = 2-Prime-Fluoro modified nucleoside
  modified_base order(1..20,22,27,29..32): mod_base = OTHER; note = 2-Prime-O-Methyl modified nucleoside
  modified_base order(1^2,31^32): mod_base = OTHER; note = (1,3-dimethylimidazolidin-2-ylidene) Phosphoramidate linkage
  modified_base order(2..26,27..31): mod_base = OTHER; note = Phosphorothioate linkage
  modified_base 26^27: mod_base = OTHER; note = Methylphosphonate linkage
  misc_feature 1..32: note = RM109437

SEQ ID NO: 663 - DNA, 32 bp, synthetic construct; identical to SEQ ID NO: 187
  source 1..32: mol_type = other DNA
  misc_feature 22..23: note = DNA
  misc_feature order(1..21,24..32): note = RNA
  modified_base 21: mod_base = OTHER; note = 2-Prime-O-Methoxyethyl modified 5-methyl Cytidine
  modified_base 22: mod_base = OTHER; note = DNA nucleotide carrying a 6-amino-5-nitro-3-yl-2(1H)-pyridone nucleobase
  modified_base 23: mod_base = OTHER; note = DNA nucleotide carrying a hypoxanthine nucleobase
  modified_base order(18,20,25): mod_base = OTHER; note = 2-Prime-Fluoro modified nucleoside
  modified_base order(1..17,19,24,26..32): mod_base = OTHER; note = 2-Prime-O-Methyl modified nucleoside
  modified_base order(1^2,31^32): mod_base = OTHER; note = (1,3-dimethylimidazolidin-2-ylidene) Phosphoramidate linkage
  modified_base order(2..23,24..31): mod_base = OTHER; note = Phosphorothioate linkage
  modified_base 23^24: mod_base = OTHER; note = Methylphosphonate linkage
  misc_feature 1..32: note = RM109438

SEQ ID NO: 664 - DNA, 32 bp, synthetic construct; identical to SEQ ID NO: 5
  source 1..32: mol_type = other DNA
  misc_feature 19..20: note = DNA
  misc_feature order(1..18,21..32): note = RNA
  modified_base 18: mod_base = OTHER; note = 2-Prime-O-Methoxyethyl modified 5-methyl Cytidine
  modified_base 19: mod_base = OTHER; note = DNA nucleotide carrying a 6-amino-5-nitro-3-yl-2(1H)-pyridone nucleobase
  modified_base 20: mod_base = OTHER; note = DNA nucleotide carrying a hypoxanthine nucleobase
  modified_base order(15,17,22): mod_base = OTHER; note = 2-Prime-Fluoro modified nucleoside
  modified_base order(1..14,16,21,23..32): mod_base = OTHER; note = 2-Prime-O-Methyl modified nucleoside
  modified_base order(1^2,31^32): mod_base = OTHER; note = (1,3-dimethylimidazolidin-2-ylidene) Phosphoramidate linkage
  modified_base order(2..20,21..31): mod_base = OTHER; note = Phosphorothioate linkage
  modified_base 20^21: mod_base = OTHER; note = Methylphosphonate linkage
  misc_feature 1..32: note = RM109439

SEQ ID NO: 665 - DNA, 32 bp, synthetic construct; identical to SEQ ID NO: 189
  source 1..32: mol_type = other DNA
  misc_feature 16..17: note = DNA
  misc_feature order(1..15,18..32): note = RNA
  modified_base 15: mod_base = OTHER; note = 2-Prime-O-Methoxyethyl modified 5-methyl Cytidine
  modified_base 16: mod_base = OTHER; note = DNA nucleotide carrying a 6-amino-5-nitro-3-yl-2(1H)-pyridone nucleobase
  modified_base 17: mod_base = OTHER; note = DNA nucleotide carrying a hypoxanthine nucleobase
  modified_base order(12,14,19): mod_base = OTHER; note = 2-Prime-Fluoro modified nucleoside
  modified_base order(1..11,13,18,20..32): mod_base = OTHER; note = 2-Prime-O-Methyl modified nucleoside
  modified_base order(1^2,31^32): mod_base = OTHER; note = (1,3-dimethylimidazolidin-2-ylidene) Phosphoramidate linkage
  modified_base order(2..17,18..31): mod_base = OTHER; note = Phosphorothioate linkage
  modified_base 17^18: mod_base = OTHER; note = Methylphosphonate linkage
  misc_feature 1..32: note = RM109440

SEQ ID NO: 666 - DNA, 32 bp, synthetic construct; identical to SEQ ID NO: 190
  source 1..32: mol_type = other DNA
  misc_feature 13..14: note = DNA
  misc_feature order(1..12,15..32): note = RNA
  modified_base 12: mod_base = OTHER; note = 2-Prime-O-Methoxyethyl modified 5-methyl Cytidine
  modified_base 13: mod_base = OTHER; note = DNA nucleotide carrying a 6-amino-5-nitro-3-yl-2(1H)-pyridone nucleobase
  modified_base 14: mod_base = OTHER; note = DNA nucleotide carrying a hypoxanthine nucleobase
  modified_base order(9,11,16): mod_base = OTHER; note = 2-Prime-Fluoro modified nucleoside
  modified_base order(1..8,10,15,17..32): mod_base = OTHER; note = 2-Prime-O-Methyl modified nucleoside
  modified_base order(1^2,31^32): mod_base = OTHER; note = (1,3-dimethylimidazolidin-2-ylidene) Phosphoramidate linkage
  modified_base order(2..14,15..31): mod_base = OTHER; note = Phosphorothioate linkage
  modified_base 14^15: mod_base = OTHER; note = Methylphosphonate linkage
  misc_feature 1..32: note = RM109441

SEQ ID NO: 667 - DNA, 32 bp, synthetic construct; identical to SEQ ID NO: 191
  source 1..32: mol_type = other DNA
  misc_feature 10..11: note = DNA
  misc_feature order(1..9,12..32): note = RNA
  modified_base 9: mod_base = OTHER; note = 2-Prime-O-Methoxyethyl modified 5-methyl Cytidine
  modified_base 10: mod_base = OTHER; note = DNA nucleotide carrying a 6-amino-5-nitro-3-yl-2(1H)-pyridone nucleobase
  modified_base 11: mod_base = OTHER; note = DNA nucleotide carrying a hypoxanthine nucleobase
  modified_base order(6,8,13): mod_base = OTHER; note = 2-Prime-Fluoro modified nucleoside
  modified_base order(1..5,7,12,14..32): mod_base = OTHER; note = 2-Prime-O-Methyl modified nucleoside
  modified_base order(1^2,31^32): mod_base = OTHER; note = (1,3-dimethylimidazolidin-2-ylidene) Phosphoramidate linkage
  modified_base order(2..11,12..31): mod_base = OTHER; note = Phosphorothioate linkage
  modified_base 11^12: mod_base = OTHER; note = Methylphosphonate linkage
  misc_feature 1..32: note = RM109442

SEQ ID NO: 668 - DNA, 32 bp, synthetic construct; identical to SEQ ID NO: 192
  source 1..32: mol_type = other DNA
  misc_feature 7..8: note = DNA
  misc_feature order(1..6,9..32): note = RNA
  modified_base 6: mod_base = OTHER; note = 2-Prime-O-Methoxyethyl modified 5-methyl Cytidine
  modified_base 7: mod_base = OTHER; note = DNA nucleotide carrying a 6-amino-5-nitro-3-yl-2(1H)-pyridone nucleobase
  modified_base 8: mod_base = OTHER; note = DNA nucleotide carrying a hypoxanthine nucleobase
  modified_base order(3,5,10): mod_base = OTHER; note = 2-Prime-Fluoro modified nucleoside
  modified_base order(1..2,4,9,11..32): mod_base = OTHER; note = 2-Prime-O-Methyl modified nucleoside
  modified_base order(1^2,31^32): mod_base = OTHER; note = (1,3-dimethylimidazolidin-2-ylidene) Phosphoramidate linkage
  modified_base order(2..8,9..31): mod_base = OTHER; note = Phosphorothioate linkage
  modified_base 8^9: mod_base = OTHER; note = Methylphosphonate linkage
  misc_feature 1..32: note = RM109443

SEQ ID NO: 669 - DNA, 23 bp, synthetic construct
  source 1..23: mol_type = other DNA
  misc_feature 18..19: note = DNA
  misc_feature order(1..17,20..23): note = RNA
  modified_base 17: mod_base = OTHER; note = 2-Prime-O-Methoxyethyl modified 5-methyl Cytidine
  modified_base 18: mod_base = OTHER; note = DNA nucleotide carrying a 6-amino-5-nitro-3-yl-2(1H)-pyridone nucleobase
  modified_base 19: mod_base = OTHER; note = DNA nucleotide carrying a hypoxanthine nucleobase
  modified_base order(6,11..12,14,21,23): mod_base = OTHER; note = 2-Prime-Fluoro modified nucleoside
  modified_base order(1..5,7..10,13,15..16,20,22): mod_base = OTHER; note = 2-Prime-O-Methyl modified nucleoside
  modified_base order(1^2,22^23): mod_base = OTHER; note = (1,3-dimethylimidazolidin-2-ylidene) Phosphoramidate linkage
  modified_base order(2..19,20..22): mod_base = OTHER; note = Phosphorothioate linkage
  modified_base 19^20: mod_base = OTHER; note = Methylphosphonate linkage
  misc_feature 1..23: note = RM109444
ggggcatgatgccatacnntgcc

SEQ ID NO: 670 - DNA, 23 bp, synthetic construct
  source 1..23: mol_type = other DNA
  misc_feature 15..16: note = DNA
  misc_feature order(1..14,17..23): note = RNA
  modified_base 14: mod_base = OTHER; note = 2-Prime-O-Methoxyethyl modified 5-methyl Cytidine
  modified_base 15: mod_base = OTHER; note = DNA nucleotide carrying a 6-amino-5-nitro-3-yl-2(1H)-pyridone nucleobase
  modified_base 16: mod_base = OTHER; note = DNA nucleotide carrying a hypoxanthine nucleobase
  modified_base order(3,8..9,11,18,20): mod_base = OTHER; note = 2-Prime-Fluoro modified nucleoside
  modified_base order(1..2,4..7,10,12..13,17,19,21..23): mod_base = OTHER; note = 2-Prime-O-Methyl modified nucleoside
  modified_base order(1^2,22^23): mod_base = OTHER; note = (1,3-dimethylimidazolidin-2-ylidene) Phosphoramidate linkage
  modified_base order(2..16,17..22): mod_base = OTHER; note = Phosphorothioate linkage
  modified_base 16^17: mod_base = OTHER; note = Methylphosphonate linkage
  misc_feature 1..23: note = RM109445
gcatgatgccatacnntgccacc

SEQ ID NO: 671 - DNA, 32 bp, synthetic construct; identical to SEQ ID NO: 186
  source 1..32: mol_type = other DNA
  misc_feature 25..26: note = DNA
  misc_feature order(1..24,27..32): note = RNA
  modified_base 24: mod_base = OTHER; note = 2-Prime-O-Methoxyethyl modified 5-methyl Cytidine
  modified_base 25: mod_base = OTHER; note = DNA nucleotide carrying a 6-amino-5-nitro-3-yl-2(1H)-pyridone nucleobase
  modified_base 26: mod_base = OTHER; note = DNA nucleotide carrying a hypoxanthine nucleobase
  modified_base order(13,18..19,21,28,30): mod_base = OTHER; note = 2-Prime-Fluoro modified nucleoside
  modified_base order(1..12,14..17,20,22..23,27,29,31..32): mod_base = OTHER; note = 2-Prime-O-Methyl modified nucleoside
  modified_base order(1^2,31^32): mod_base = OTHER; note = (1,3-dimethylimidazolidin-2-ylidene) Phosphoramidate linkage
  modified_base order(2..26,27..31): mod_base = OTHER; note = Phosphorothioate linkage
  modified_base 26^27: mod_base = OTHER; note = Methylphosphonate linkage
  misc_feature 1..32: note = RM109446

SEQ ID NO: 672 - DNA, 32 bp, synthetic construct; identical to SEQ ID NO: 187
  source 1..32: mol_type = other DNA
  misc_feature 22..23: note = DNA
  misc_feature order(1..21,24..32): note = RNA
  modified_base 21: mod_base = OTHER; note = 2-Prime-O-Methoxyethyl modified 5-methyl Cytidine
  modified_base 22: mod_base = OTHER; note = DNA nucleotide carrying a 6-amino-5-nitro-3-yl-2(1H)-pyridone nucleobase
  modified_base 23: mod_base = OTHER; note = DNA nucleotide carrying a hypoxanthine nucleobase
  modified_base order(10,15..16,18,25,27): mod_base = OTHER; note = 2-Prime-Fluoro modified nucleoside
  modified_base order(1..9,11..14,17,19..20,24,26,28..32): mod_base = OTHER; note = 2-Prime-O-Methyl modified nucleoside
  modified_base order(1^2,31^32): mod_base = OTHER; note = (1,3-dimethylimidazolidin-2-ylidene) Phosphoramidate linkage
  modified_base order(2..23,24..31): mod_base = OTHER; note = Phosphorothioate linkage
  modified_base 23^24: mod_base = OTHER; note = Methylphosphonate linkage
  misc_feature 1..32: note = RM109447

SEQ ID NO: 673 - DNA, 32 bp, synthetic construct; identical to SEQ ID NO: 5
  source 1..32: mol_type = other DNA
  misc_feature 19..20: note = DNA
  misc_feature order(1..18,21..32): note = RNA
  modified_base 18: mod_base = OTHER; note = 2-Prime-O-Methoxyethyl modified 5-methyl Cytidine
  modified_base 19: mod_base = OTHER; note = DNA nucleotide carrying a 6-amino-5-nitro-3-yl-2(1H)-pyridone nucleobase
  modified_base 20: mod_base = OTHER; note = DNA nucleotide carrying a hypoxanthine nucleobase
  modified_base order(7,12..13,15,22,24): mod_base = OTHER; note = 2-Prime-Fluoro modified nucleoside
  modified_base order(1..6,8..11,14,16..17,21,23,25..32): mod_base = OTHER; note = 2-Prime-O-Methyl modified nucleoside
  modified_base order(1^2,31^32): mod_base = OTHER; note = (1,3-dimethylimidazolidin-2-ylidene) Phosphoramidate linkage
  modified_base order(2..20,21..31): mod_base = OTHER; note = Phosphorothioate linkage
  modified_base 20^21: mod_base = OTHER; note = Methylphosphonate linkage
  misc_feature 1..32: note = RM109448

SEQ ID NO: 674 - DNA, 32 bp, synthetic construct; identical to SEQ ID NO: 189
  source 1..32: mol_type = other DNA
  misc_feature 16..17: note = DNA
  misc_feature order(1..15,18..32): note = RNA
  modified_base 15: mod_base = OTHER; note = 2-Prime-O-Methoxyethyl modified 5-methyl Cytidine
  modified_base 16: mod_base = OTHER; note = DNA nucleotide carrying a 6-amino-5-nitro-3-yl-2(1H)-pyridone nucleobase
  modified_base 17: mod_base = OTHER; note = DNA nucleotide carrying a hypoxanthine nucleobase
  modified_base order(4,9..10,12,19,21): mod_base = OTHER; note = 2-Prime-Fluoro modified nucleoside
  modified_base order(1..3,5..8,11,13..14,18,20,22..32): mod_base = OTHER; note = 2-Prime-O-Methyl modified nucleoside
  modified_base order(1^2,31^32): mod_base = OTHER; note = (1,3-dimethylimidazolidin-2-ylidene) Phosphoramidate linkage
  modified_base order(2..17,18..31): mod_base = OTHER; note = Phosphorothioate linkage
  modified_base 17^18: mod_base = OTHER; note = Methylphosphonate linkage
  misc_feature 1..32: note = RM109449

SEQ ID NO: 675 - DNA, 32 bp, synthetic construct; identical to SEQ ID NO: 190
  source 1..32: mol_type = other DNA
  misc_feature 13..14: note = DNA
  misc_feature order(1..12,15..32): note = RNA
  modified_base 12: mod_base = OTHER; note = 2-Prime-O-Methoxyethyl modified 5-methyl Cytidine
  modified_base 13: mod_base = OTHER; note = DNA nucleotide carrying a 6-amino-5-nitro-3-yl-2(1H)-pyridone nucleobase
  modified_base 14: mod_base = OTHER; note = DNA nucleotide carrying a hypoxanthine nucleobase
  modified_base order(1,6..7,9,16,18): mod_base = OTHER; note = 2-Prime-Fluoro modified nucleoside
  modified_base order(2..5,8,10..11,15,17,19..32): mod_base = OTHER; note = 2-Prime-O-Methyl modified nucleoside
  modified_base order(1^2,31^32): mod_base = OTHER; note = (1,3-dimethylimidazolidin-2-ylidene) Phosphoramidate linkage
  modified_base order(2..14,15..31): mod_base = OTHER; note = Phosphorothioate linkage
  modified_base 14^15: mod_base = OTHER; note = Methylphosphonate linkage
  misc_feature 1..32: note = RM109450

SEQ ID NO: 676 - DNA, 23 bp, synthetic construct
  source 1..23: mol_type = other DNA
  misc_feature 9..10: note = DNA
  misc_feature order(1..8,11..23): note = RNA
  modified_base 8: mod_base = OTHER; note = 2-Prime-O-Methoxyethyl modified 5-methyl Cytidine
  modified_base 9: mod_base = OTHER; note = DNA nucleotide carrying a 6-amino-5-nitro-3-yl-2(1H)-pyridone nucleobase
  modified_base 10: mod_base = OTHER; note = DNA nucleotide carrying a hypoxanthine nucleobase
  modified_base order(6,12,15,17..18,23): mod_base = OTHER; note = 2-Prime-Fluoro modified nucleoside
  modified_base order(1..5,7,11,13..14,16,19..22): mod_base = OTHER; note = 2-Prime-O-Methyl modified nucleoside
  modified_base order(1^2,22^23): mod_base = OTHER; note = (1,3-dimethylimidazolidin-2-ylidene) Phosphoramidate linkage
  modified_base order(2..10,11..22): mod_base = OTHER; note = Phosphorothioate linkage
  modified_base 10^11: mod_base = OTHER; note = Methylphosphonate linkage
  misc_feature 1..23: note = RM109451
tgccatacnntgccaccagggcg

SEQ ID NO: 677 - DNA, 23 bp, synthetic construct
  source 1..23: mol_type = other DNA
  misc_feature 6..7: note = DNA
  misc_feature order(1..5,8..23): note = RNA
  modified_base 5: mod_base = OTHER; note = 2-Prime-O-Methoxyethyl modified 5-methyl Cytidine
  modified_base 6: mod_base = OTHER; note = DNA nucleotide carrying a 6-amino-5-nitro-3-yl-2(1H)-pyridone nucleobase
  modified_base 7: mod_base = OTHER; note = DNA nucleotide carrying a hypoxanthine nucleobase
  modified_base order(3,9,12,14..15,20): mod_base = OTHER; note = 2-Prime-Fluoro modified nucleoside
  modified_base order(1..2,4,8,10..11,13,16..19,21..23): mod_base = OTHER; note = 2-Prime-O-Methyl modified nucleoside
  modified_base order(1^2,22^23): mod_base = OTHER; note = (1,3-dimethylimidazolidin-2-ylidene) Phosphoramidate linkage
  modified_base order(2..7,8..22): mod_base = OTHER; note = Phosphorothioate linkage
  modified_base 7^8: mod_base = OTHER; note = Methylphosphonate linkage
  misc_feature 1..23: note = RM109452
catacnntgccaccagggcgatg

SEQ ID NO: 678 - DNA, 32 bp, synthetic construct; identical to SEQ ID NO: 189
  source 1..32: mol_type = other DNA
  misc_feature 16..17: note = DNA
  misc_feature order(1..15,18..32): note = RNA
  modified_base 15: mod_base = OTHER; note = 2-Prime-O-Methoxyethyl modified 5-methyl Cytidine
  modified_base 16: mod_base = OTHER; note = DNA nucleotide carrying a 6-amino-5-nitro-3-yl-2(1H)-pyridone nucleobase
  modified_base 17: mod_base = OTHER; note = DNA nucleotide carrying a hypoxanthine nucleobase
  modified_base order(13,19,22,24..25,30): mod_base = OTHER; note = 2-Prime-Fluoro modified nucleoside
  modified_base order(1..12,14,18,20..21,23,26..29,31..32): mod_base = OTHER; note = 2-Prime-O-Methyl modified nucleoside
  modified_base order(1^2,31^32): mod_base = OTHER; note = (1,3-dimethylimidazolidin-2-ylidene) Phosphoramidate linkage
  modified_base order(2..17,18..31): mod_base = OTHER; note = Phosphorothioate linkage
  modified_base 17^18: mod_base = OTHER; note = Methylphosphonate linkage
  misc_feature 1..32: note = RM109453

SEQ ID NO: 679 - DNA, 32 bp, synthetic construct; identical to SEQ ID NO: 190
  source 1..32: mol_type = other DNA
  misc_feature 13..14: note = DNA
  misc_feature order(1..12,15..32): note = RNA
  modified_base 12: mod_base = OTHER; note = 2-Prime-O-Methoxyethyl modified 5-methyl Cytidine
  modified_base 13: mod_base = OTHER; note = DNA nucleotide carrying a 6-amino-5-nitro-3-yl-2(1H)-pyridone nucleobase
  modified_base 14: mod_base = OTHER; note = DNA nucleotide carrying a hypoxanthine nucleobase
  modified_base order(10,16,19,21..22,27): mod_base = OTHER; note = 2-Prime-Fluoro modified nucleoside
  modified_base order(1..9,11,15,17..18,20,23..26,28..32): mod_base = OTHER; note = 2-Prime-O-Methyl modified nucleoside
  modified_base order(1^2,31^32): mod_base = OTHER; note = (1,3-dimethylimidazolidin-2-ylidene) Phosphoramidate linkage
  modified_base order(2..14,15..31): mod_base = OTHER; note = Phosphorothioate linkage
  modified_base 14^15: mod_base = OTHER; note = Methylphosphonate linkage
  misc_feature 1..32: note = RM109454

SEQ ID NO: 680 - DNA, 32 bp, synthetic construct; identical to SEQ ID NO: 191
  source 1..32: mol_type = other DNA
  misc_feature 10..11: note = DNA
  misc_feature order(1..9,12..32): note = RNA
  modified_base 9: mod_base = OTHER; note = 2-Prime-O-Methoxyethyl modified 5-methyl Cytidine
  modified_base 10: mod_base = OTHER; note = DNA nucleotide carrying a 6-amino-5-nitro-3-yl-2(1H)-pyridone nucleobase
  modified_base 11: mod_base = OTHER; note = DNA nucleotide carrying a hypoxanthine nucleobase
  modified_base order(7,13,16,18..19,24): mod_base = OTHER; note = 2-Prime-Fluoro modified nucleoside
  modified_base order(1..6,8,12,14..15,17,20..23,25..32): mod_base = OTHER; note = 2-Prime-O-Methyl modified nucleoside
  modified_base order(1^2,31^32): mod_base = OTHER; note = (1,3-dimethylimidazolidin-2-ylidene) Phosphoramidate linkage
  modified_base order(2..11,12..31): mod_base = OTHER; note = Phosphorothioate linkage
  modified_base 11^12: mod_base = OTHER; note = Methylphosphonate linkage
  misc_feature 1..32: note = RM109455

SEQ ID NO: 681 - DNA, 32 bp, synthetic construct; identical to SEQ ID NO: 192
  source 1..32: mol_type = other DNA
  misc_feature 7..8: note = DNA
  misc_feature order(1..6,9..32): note = RNA
  modified_base 6: mod_base = OTHER; note = 2-Prime-O-Methoxyethyl modified 5-methyl Cytidine
  modified_base 7: mod_base = OTHER; note = DNA nucleotide carrying a 6-amino-5-nitro-3-yl-2(1H)-pyridone nucleobase
  modified_base 8: mod_base = OTHER; note = DNA nucleotide carrying a hypoxanthine nucleobase
  modified_base order(4,10,13,15..16,21): mod_base = OTHER; note = 2-Prime-Fluoro modified nucleoside
  modified_base order(1..3,5,9,11..12,14,17..20,22..32): mod_base = OTHER; note = 2-Prime-O-Methyl modified nucleoside
  modified_base order(1^2,31^32): mod_base = OTHER; note = (1,3-dimethylimidazolidin-2-ylidene) Phosphoramidate linkage
  modified_base order(2..8,9..31): mod_base = OTHER; note = Phosphorothioate linkage
  modified_base 8^9: mod_base = OTHER; note = Methylphosphonate linkage
  misc_feature 1..32: note = RM109456

SEQ ID NO: 682 - DNA, 23 bp, synthetic construct
  source 1..23: mol_type = other DNA
  misc_feature 18..19: note = DNA
  misc_feature order(1..17,20..23): note = RNA
  modified_base 17: mod_base = OTHER; note = 2-Prime-O-Methoxyethyl modified 5-methyl Cytidine
  modified_base 18: mod_base = OTHER; note = DNA nucleotide carrying a 6-amino-5-nitro-3-yl-2(1H)-pyridone nucleobase
  modified_base 19: mod_base = OTHER; note = DNA nucleotide carrying a hypoxanthine nucleobase
  modified_base order(12,14,21,23): mod_base = OTHER; note = 2-Prime-Fluoro modified nucleoside
  modified_base order(1..11,13,15..16,20,22): mod_base = OTHER; note = 2-Prime-O-Methyl modified nucleoside
  modified_base order(1^2,22^23): mod_base = OTHER; note = (1,3-dimethylimidazolidin-2-ylidene) Phosphoramidate linkage
  modified_base order(2..19,20..22): mod_base = OTHER; note = Phosphorothioate linkage
  modified_base 19^20: mod_base = OTHER; note = Methylphosphonate linkage
  misc_feature 1..23: note = RM109457
ggggcatgatgccatacnntgcc

SEQ ID NO: 683 - DNA, 23 bp, synthetic construct
  source 1..23: mol_type = other DNA
  misc_feature 15..16: note = DNA
  misc_feature order(1..14,17..23): note = RNA
  modified_base 14: mod_base = OTHER; note = 2-Prime-O-Methoxyethyl modified 5-methyl Cytidine
  modified_base 15: mod_base = OTHER; note = DNA nucleotide carrying a 6-amino-5-nitro-3-yl-2(1H)-pyridone nucleobase
  modified_base 16: mod_base = OTHER; note = DNA nucleotide carrying a hypoxanthine nucleobase
  modified_base order(9,11,18,20): mod_base = OTHER; note = 2-Prime-Fluoro modified nucleoside
  modified_base order(1..8,10,12..13,17,19,21..23): mod_base = OTHER; note = 2-Prime-O-Methyl modified nucleoside
  modified_base order(1^2,22^23): mod_base = OTHER; note = (1,3-dimethylimidazolidin-2-ylidene) Phosphoramidate linkage
  modified_base order(2..16,17..22): mod_base = OTHER; note = Phosphorothioate linkage
  modified_base 16^17: mod_base = OTHER; note = Methylphosphonate linkage
  misc_feature 1..23: note = RM109458
gcatgatgccatacnntgccacc

SEQ ID NO: 684 - DNA, 23 bp, synthetic construct
  source 1..23: mol_type = other DNA
  misc_feature 12..13: note = DNA
  misc_feature order(1..11,14..23): note = RNA
  modified_base 11: mod_base = OTHER; note = 2-Prime-O-Methoxyethyl modified 5-methyl Cytidine
  modified_base 12: mod_base = OTHER; note = DNA nucleotide carrying a 6-amino-5-nitro-3-yl-2(1H)-pyridone nucleobase
  modified_base 13: mod_base = OTHER; note = DNA nucleotide carrying a hypoxanthine nucleobase
  modified_base order(6,8,15,17): mod_base = OTHER; note = 2-Prime-Fluoro modified nucleoside
  modified_base order(1..5,7,9..10,14,16,18..23): mod_base = OTHER; note = 2-Prime-O-Methyl modified nucleoside
  modified_base order(1^2,22^23): mod_base = OTHER; note = (1,3-dimethylimidazolidin-2-ylidene) Phosphoramidate linkage
  modified_base order(2..13,14..22): mod_base = OTHER; note = Phosphorothioate linkage
  modified_base 13^14: mod_base = OTHER; note = Methylphosphonate linkage
  misc_feature 1..23: note = RM109459
tgatgccatacnntgccaccagg

SEQ ID NO: 685 - DNA, 23 bp, synthetic construct
  source 1..23: mol_type = other DNA
  misc_feature 9..10: note = DNA
  misc_feature order(1..8,11..23): note = RNA
  modified_base 8: mod_base = OTHER; note = 2-Prime-O-Methoxyethyl modified 5-methyl Cytidine
  modified_base 9: mod_base = OTHER; note = DNA nucleotide carrying a 6-amino-5-nitro-3-yl-2(1H)-pyridone nucleobase
  modified_base 10: mod_base = OTHER; note = DNA nucleotide carrying a hypoxanthine nucleobase
  modified_base order(3,5,12,14): mod_base = OTHER; note = 2-Prime-Fluoro modified nucleoside
  modified_base order(1..2,4,6..7,11,13,15..23): mod_base = OTHER; note = 2-Prime-O-Methyl modified nucleoside
  modified_base order(1^2,22^23): mod_base = OTHER; note = (1,3-dimethylimidazolidin-2-ylidene) Phosphoramidate linkage
  modified_base order(2..10,11..22): mod_base = OTHER; note = Phosphorothioate linkage
  modified_base 10^11: mod_base = OTHER; note = Methylphosphonate linkage
  misc_feature 1..23: note = RM109460
tgccatacnntgccaccagggcg

SEQ ID NO: 686 - DNA, 23 bp, synthetic construct
  source 1..23: mol_type = other DNA
  misc_feature 15..16: note = DNA
  misc_feature order(1..14,17..23): note = RNA
  modified_base 14: mod_base = OTHER; note = 2-Prime-O-Methoxyethyl modified 5-methyl Cytidine
  modified_base 15: mod_base = OTHER; note = DNA nucleotide carrying a 6-amino-5-nitro-3-yl-2(1H)-pyridone nucleobase
  modified_base 16: mod_base = OTHER; note = DNA nucleotide carrying a hypoxanthine nucleobase
  modified_base order(12,18,21,23): mod_base = OTHER; note = 2-Prime-Fluoro modified nucleoside
  modified_base order(1..11,13,17,19..20,22): mod_base = OTHER; note = 2-Prime-O-Methyl modified nucleoside
  modified_base order(1^2,22^23): mod_base = OTHER; note = (1,3-dimethylimidazolidin-2-ylidene) Phosphoramidate linkage
  modified_base order(2..16,17..22): mod_base = OTHER; note = Phosphorothioate linkage
  modified_base 16^17: mod_base = OTHER; note = Methylphosphonate linkage
  misc_feature 1..23: note = RM109461
gcatgatgccatacnntgccacc

SEQ ID NO: 687 - DNA, 23 bp, synthetic construct
  source 1..23: mol_type = other DNA
  misc_feature 12..13: note = DNA
  misc_feature order(1..11,14..23): note = RNA
  modified_base 11: mod_base = OTHER; note = 2-Prime-O-Methoxyethyl modified 5-methyl Cytidine
  modified_base 12: mod_base = OTHER; note = DNA nucleotide carrying a 6-amino-5-nitro-3-yl-2(1H)-pyridone nucleobase
  modified_base 13: mod_base = OTHER; note = DNA nucleotide carrying a hypoxanthine nucleobase
  modified_base order(9,15,18,20): mod_base = OTHER; note = 2-Prime-Fluoro modified nucleoside
  modified_base order(1..8,10,14,16..17,19,21..23): mod_base = OTHER; note = 2-Prime-O-Methyl modified nucleoside
  modified_base order(1^2,22^23): mod_base = OTHER; note = (1,3-dimethylimidazolidin-2-ylidene) Phosphoramidate linkage
  modified_base order(2..13,14..22): mod_base = OTHER; note = Phosphorothioate linkage
  modified_base 13^14: mod_base = OTHER; note = Methylphosphonate linkage
  misc_feature 1..23: note = RM109462
tgatgccatacnntgccaccagg

SEQ ID NO: 688 - DNA, 23 bp, synthetic construct
  source 1..23: mol_type = other DNA
  misc_feature 9..10: note = DNA
  misc_feature order(1..8,11..23): note = RNA
  modified_base 8: mod_base = OTHER; note = 2-Prime-O-Methoxyethyl modified 5-methyl Cytidine
  modified_base 9: mod_base = OTHER; note = DNA nucleotide carrying a 6-amino-5-nitro-3-yl-2(1H)-pyridone nucleobase
  modified_base 10: mod_base = OTHER; note = DNA nucleotide carrying a hypoxanthine nucleobase
  modified_base order(6,12,15,17): mod_base = OTHER; note = 2-Prime-Fluoro modified nucleoside
  modified_base order(1..5,7,11,13..14,16,18..23): mod_base = OTHER; note = 2-Prime-O-Methyl modified nucleoside
  modified_base order(1^2,22^23): mod_base = OTHER; note = (1,3-dimethylimidazolidin-2-ylidene) Phosphoramidate linkage
  modified_base order(2..10,11..22): mod_base = OTHER; note = Phosphorothioate linkage
  modified_base 10^11: mod_base = OTHER; note = Methylphosphonate linkage
  misc_feature 1..23: note = RM109463
tgccatacnntgccaccagggcg

SEQ ID NO: 689 - DNA, 23 bp, synthetic construct
  source 1..23: mol_type = other DNA
  misc_feature 6..7: note = DNA
  misc_feature order(1..5,8..23): note = RNA
  modified_base 5: mod_base = OTHER; note = 2-Prime-O-Methoxyethyl modified 5-methyl Cytidine
  modified_base 6: mod_base = OTHER; note = DNA nucleotide carrying a 6-amino-5-nitro-3-yl-2(1H)-pyridone nucleobase
  modified_base 7: mod_base = OTHER; note = DNA nucleotide carrying a hypoxanthine nucleobase
  modified_base order(3,9,12,14): mod_base = OTHER; note = 2-Prime-Fluoro modified nucleoside
  modified_base order(1..2,4,8,10..11,13,15..23): mod_base = OTHER; note = 2-Prime-O-Methyl modified nucleoside
  modified_base order(1^2,22^23): mod_base = OTHER; note = (1,3-dimethylimidazolidin-2-ylidene) Phosphoramidate linkage
  modified_base order(2..7,8..22): mod_base = OTHER; note = Phosphorothioate linkage
  modified_base 7^8: mod_base = OTHER; note = Methylphosphonate linkage
  misc_feature 1..23: note = RM109464
catacnntgccaccagggcgatg

SEQ ID NO: 690 - DNA, 32 bp, synthetic construct; identical to SEQ ID NO: 192
  source 1..32: mol_type = other DNA
  misc_feature 7..8: note = DNA
  misc_feature order(1..6,9..32): note = RNA
  modified_base 6: mod_base = OTHER; note = 2-Prime-O-Methoxyethyl modified 5-methyl Cytidine
  modified_base 7: mod_base = OTHER; note = DNA nucleotide carrying a 6-amino-5-nitro-3-yl-2(1H)-pyridone nucleobase
  modified_base 8: mod_base = OTHER; note = DNA nucleotide carrying a hypoxanthine nucleobase
  modified_base order(5,10,12,15..17,20,23,31): mod_base = OTHER; note = 2-Prime-Fluoro modified nucleoside
  modified_base order(1..4,9,11,13..14,18..19,21..22,24..30,32): mod_base = OTHER; note = 2-Prime-O-Methyl modified nucleoside
  modified_base order(1^2,31^32): mod_base = OTHER; note = (1,3-dimethylimidazolidin-2-ylidene) Phosphoramidate linkage
  modified_base order(2..8,9..31): mod_base = OTHER; note = Phosphorothioate linkage
  modified_base 8^9: mod_base = OTHER; note = Methylphosphonate linkage
  misc_feature 1..32: note = RM109465

SEQ ID NO: 691 - DNA, 32 bp, synthetic construct; identical to SEQ ID NO: 185
  source 1..32: mol_type = other DNA
  misc_feature 28..29: note = DNA
  misc_feature order(1..27,30..32): note = RNA
  modified_base 27: mod_base = OTHER; note = 2-Prime-O-Methoxyethyl modified 5-methyl Cytidine
  modified_base 28: mod_base = OTHER; note = DNA nucleotide carrying a 6-amino-5-nitro-3-yl-2(1H)-pyridone nucleobase
  modified_base 29: mod_base = OTHER; note = DNA nucleotide carrying a hypoxanthine nucleobase
  modified_base order(6,14,17,20..22,25,31..32): mod_base = OTHER; note = 2-Prime-Fluoro modified nucleoside
  modified_base order(1..5,7..13,15..16,18..19,23..24,26,30): mod_base = OTHER; note = 2-Prime-O-Methyl modified nucleoside
  modified_base order(1^2,31^32): mod_base = OTHER; note = (1,3-dimethylimidazolidin-2-ylidene) Phosphoramidate linkage
  modified_base order(2..29,30^31): mod_base = OTHER; note = Phosphorothioate linkage
  modified_base 29^30: mod_base = OTHER; note = Methylphosphonate linkage
  misc_feature 1..32: note = RM109466

SEQ ID NO: 692 - DNA, 32 bp, synthetic construct; identical to SEQ ID NO: 186
  source 1..32: mol_type = other DNA
  misc_feature 25..26: note = DNA
  misc_feature order(1..24,27..32): note = RNA
  modified_base 24: mod_base = OTHER; note = 2-Prime-O-Methoxyethyl modified 5-methyl Cytidine
  modified_base 25: mod_base = OTHER; note = DNA nucleotide carrying a 6-amino-5-nitro-3-yl-2(1H)-pyridone nucleobase
  modified_base 26: mod_base = OTHER; note = DNA nucleotide carrying a hypoxanthine nucleobase
  modified_base order(3,11,14,17..19,22,28..29): mod_base = OTHER; note = 2-Prime-Fluoro modified nucleoside
  modified_base order(1..2,4..10,12..13,15..16,20..21,23,27,30..32): mod_base = OTHER; note = 2-Prime-O-Methyl modified nucleoside
  modified_base order(1^2,31^32): mod_base = OTHER; note = (1,3-dimethylimidazolidin-2-ylidene) Phosphoramidate linkage
  modified_base order(2..26,27..31): mod_base = OTHER; note = Phosphorothioate linkage
  modified_base 26^27: mod_base = OTHER; note = Methylphosphonate linkage
  misc_feature 1..32: note = RM109467

SEQ ID NO: 693 - DNA, 23 bp, synthetic construct
  source 1..23: mol_type = other DNA
  misc_feature 12..13: note = DNA
  misc_feature order(1..11,14..23): note = RNA
  modified_base 11: mod_base = OTHER; note = 2-Prime-O-Methoxyethyl modified 5-methyl Cytidine
  modified_base 12: mod_base = OTHER; note = DNA nucleotide carrying a 6-amino-5-nitro-3-yl-2(1H)-pyridone nucleobase
  modified_base 13: mod_base = OTHER; note = DNA nucleotide carrying a hypoxanthine nucleobase
  modified_base order(10,15,17,20..22): mod_base = OTHER; note = 2-Prime-Fluoro modified nucleoside
  modified_base order(1..9,14,16,18..19,23): mod_base = OTHER; note = 2-Prime-O-Methyl modified nucleoside
  modified_base order(1^2,22^23): mod_base = OTHER; note = (1,3-dimethylimidazolidin-2-ylidene) Phosphoramidate linkage
  modified_base order(2..13,14..22): mod_base = OTHER; note = Phosphorothioate linkage
  modified_base 13^14: mod_base = OTHER; note = Methylphosphonate linkage
  misc_feature 1..23: note = RM109468
tgatgccatacnntgccaccagg

SEQ ID NO: 694 - DNA, 23 bp, synthetic construct
  source 1..23: mol_type = other DNA
  misc_feature 9..10: note = DNA
  misc_feature order(1..8,11..23): note = RNA
  modified_base 8: mod_base = OTHER; note = 2-Prime-O-Methoxyethyl modified 5-methyl Cytidine
  modified_base 9: mod_base = OTHER; note = DNA nucleotide carrying a 6-amino-5-nitro-3-yl-2(1H)-pyridone nucleobase
  modified_base 10: mod_base = OTHER; note = DNA nucleotide carrying a hypoxanthine nucleobase
  modified_base order(7,12,14,17..19): mod_base = OTHER; note = 2-Prime-Fluoro modified nucleoside
  modified_base order(1..6,11,13,15..16,20..23): mod_base = OTHER; note = 2-Prime-O-Methyl modified nucleoside
  modified_base order(1^2,22^23): mod_base = OTHER; note = (1,3-dimethylimidazolidin-2-ylidene) Phosphoramidate linkage
  modified_base order(2..10,11..22): mod_base = OTHER; note = Phosphorothioate linkage
  modified_base 10^11: mod_base = OTHER; note = Methylphosphonate linkage
  misc_feature 1..23: note = RM109469
tgccatacnntgccaccagggcg

SEQ ID NO: 695 - DNA, 23 bp, synthetic construct
  source 1..23: mol_type = other DNA
  misc_feature 6..7: note = DNA
  misc_feature order(1..5,8..23): note = RNA
  modified_base 5: mod_base = OTHER; note = 2-Prime-O-Methoxyethyl modified 5-methyl Cytidine
  modified_base 6: mod_base = OTHER; note = DNA nucleotide carrying a 6-amino-5-nitro-3-yl-2(1H)-pyridone nucleobase
  modified_base 7: mod_base = OTHER; note = DNA nucleotide carrying a hypoxanthine nucleobase
  modified_base order(4,9,11,14..16): mod_base = OTHER; note = 2-Prime-Fluoro modified nucleoside
  modified_base order(1..3,8,10,12..13,17..23): mod_base = OTHER; note = 2-Prime-O-Methyl modified nucleoside
  modified_base order(1^2,22^23): mod_base = OTHER; note = (1,3-dimethylimidazolidin-2-ylidene) Phosphoramidate linkage
  modified_base order(2..7,8..22): mod_base = OTHER; note = Phosphorothioate linkage
  modified_base 7^8: mod_base = OTHER; note = Methylphosphonate linkage
  misc_feature 1..23: note = RM109470
catacnntgccaccagggcgatg

SEQ ID NO: 696 - DNA, 32 bp, synthetic construct; identical to SEQ ID NO: 187
  source 1..32: mol_type = other DNA
  misc_feature 22..23: note = DNA
  misc_feature order(1..21,24..32): note = RNA
  modified_base 21: mod_base = OTHER; note = 2-Prime-O-Methoxyethyl modified 5-methyl Cytidine
  modified_base 22: mod_base = OTHER; note = DNA nucleotide carrying a 6-amino-5-nitro-3-yl-2(1H)-pyridone nucleobase
  modified_base 23: mod_base = OTHER; note = DNA nucleotide carrying a hypoxanthine nucleobase
  modified_base order(20,25,27,30..32): mod_base = OTHER; note = 2-Prime-Fluoro modified nucleoside
  modified_base order(1..19,24,26,28..29): mod_base = OTHER; note = 2-Prime-O-Methyl modified nucleoside
  modified_base order(1^2,31^32): mod_base = OTHER; note = (1,3-dimethylimidazolidin-2-ylidene) Phosphoramidate linkage
  modified_base order(2..23,24..31): mod_base = OTHER; note = Phosphorothioate linkage
  modified_base 23^24: mod_base = OTHER; note = Methylphosphonate linkage
  misc_feature 1..32: note = RM109471

SEQ ID NO: 697 - DNA, 32 bp, synthetic construct; identical to SEQ ID NO: 5
  source 1..32: mol_type = other DNA
  misc_feature 19..20: note = DNA
  misc_feature order(1..18,21..32): note = RNA
  modified_base 18: mod_base = OTHER; note = 2-Prime-O-Methoxyethyl modified 5-methyl Cytidine
  modified_base 19: mod_base = OTHER; note = DNA nucleotide carrying a 6-amino-5-nitro-3-yl-2(1H)-pyridone nucleobase
  modified_base 20: mod_base = OTHER; note = DNA nucleotide carrying a hypoxanthine nucleobase
  modified_base order(17,22,24,27..29): mod_base = OTHER; note = 2-Prime-Fluoro modified nucleoside
  modified_base order(1..16,21,23,25..26,30..32): mod_base = OTHER; note = 2-Prime-O-Methyl modified nucleoside
  modified_base order(1^2,31^32): mod_base = OTHER; note = (1,3-dimethylimidazolidin-2-ylidene) Phosphoramidate linkage
  modified_base order(2..20,21..31): mod_base = OTHER; note = Phosphorothioate linkage
  modified_base 20^21: mod_base = OTHER; note = Methylphosphonate linkage
  misc_feature 1..32: note = RM109472

SEQ ID NO: 698 - DNA, 32 bp, synthetic construct; identical to SEQ ID NO: 189
  source 1..32: mol_type = other DNA
  misc_feature 16..17: note = DNA
  misc_feature order(1..15,18..32): note = RNA
  modified_base 15: mod_base = OTHER; note = 2-Prime-O-Methoxyethyl modified 5-methyl Cytidine
  modified_base 16: mod_base = OTHER; note = DNA nucleotide carrying a 6-amino-5-nitro-3-yl-2(1H)-pyridone nucleobase
  modified_base 17: mod_base = OTHER; note = DNA nucleotide carrying a hypoxanthine nucleobase
  modified_base order(14,19,21,24..26): mod_base = OTHER; note = 2-Prime-Fluoro modified nucleoside
  modified_base order(1..13,18,20,22..23,27..32): mod_base = OTHER; note = 2-Prime-O-Methyl modified nucleoside
  modified_base order(1^2,31^32): mod_base = OTHER; note = (1,3-dimethylimidazolidin-2-ylidene) Phosphoramidate linkage
  modified_base order(2..17,18..31): mod_base = OTHER; note = Phosphorothioate linkage
  modified_base 17^18: mod_base = OTHER; note = Methylphosphonate linkage
  misc_feature 1..32: note = RM109473

SEQ ID NO: 699 - DNA, 32 bp, synthetic construct; identical to SEQ ID NO: 190
  source 1..32: mol_type = other DNA
  misc_feature 13..14: note = DNA
  misc_feature order(1..12,15..32): note = RNA
  modified_base 12: mod_base = OTHER; note = 2-Prime-O-Methoxyethyl modified 5-methyl Cytidine
  modified_base 13: mod_base = OTHER; note = DNA nucleotide carrying a 6-amino-5-nitro-3-yl-2(1H)-pyridone nucleobase
  modified_base 14: mod_base = OTHER; note = DNA nucleotide carrying a hypoxanthine nucleobase
  modified_base order(11,16,18,21..23): mod_base = OTHER; note = 2-Prime-Fluoro modified nucleoside
  modified_base order(1..10,15,17,19..20,24..32): mod_base = OTHER; note = 2-Prime-O-Methyl modified nucleoside
  modified_base order(1^2,31^32): mod_base = OTHER; note = (1,3-dimethylimidazolidin-2-ylidene) Phosphoramidate linkage
  modified_base order(2..14,15..31): mod_base = OTHER; note = Phosphorothioate linkage
  modified_base 14^15: mod_base = OTHER; note = Methylphosphonate linkage
  misc_feature 1..32: note = RM109474

SEQ ID NO: 700 - DNA, 32 bp, synthetic construct; identical to SEQ ID NO: 191
  source 1..32: mol_type = other DNA
  misc_feature 10..11: note = DNA
  misc_feature order(1..9,12..32): note = RNA
  modified_base 9: mod_base = OTHER; note = 2-Prime-O-Methoxyethyl modified 5-methyl Cytidine
  modified_base 10: mod_base = OTHER; note = DNA nucleotide carrying a 6-amino-5-nitro-3-yl-2(1H)-pyridone nucleobase
  modified_base 11: mod_base = OTHER; note = DNA nucleotide carrying a hypoxanthine nucleobase
  modified_base order(8,13,15,18..20): mod_base = OTHER; note = 2-Prime-Fluoro modified nucleoside
  modified_base order(1..7,12,14,16..17,21..32): mod_base = OTHER; note = 2-Prime-O-Methyl modified nucleoside
  modified_base order(1^2,31^32): mod_base = OTHER; note = (1,3-dimethylimidazolidin-2-ylidene) Phosphoramidate linkage
  modified_base order(2..11,12..31): mod_base = OTHER; note = Phosphorothioate linkage
  modified_base 11^12: mod_base = OTHER; note = Methylphosphonate linkage
  misc_feature 1..32: note = RM109475

SEQ ID NO: 701 - DNA, 32 bp, synthetic construct; identical to SEQ ID NO: 192
  source 1..32: mol_type = other DNA
  misc_feature 7..8: note = DNA
  misc_feature order(1..6,9..32): note = RNA
  modified_base 6: mod_base = OTHER; note = 2-Prime-O-Methoxyethyl modified 5-methyl Cytidine
  modified_base 7: mod_base = OTHER; note = DNA nucleotide carrying a 6-amino-5-nitro-3-yl-2(1H)-pyridone nucleobase
  modified_base 8: mod_base = OTHER; note = DNA nucleotide carrying a hypoxanthine nucleobase
  modified_base order(5,10,12,15..17): mod_base = OTHER; note = 2-Prime-Fluoro modified nucleoside
  modified_base order(1..4,9,11,13..14,18..32): mod_base = OTHER; note = 2-Prime-O-Methyl modified nucleoside
  modified_base order(1^2,31^32): mod_base = OTHER; note = (1,3-dimethylimidazolidin-2-ylidene) Phosphoramidate linkage
  modified_base order(2..8,9..31): mod_base = OTHER; note = Phosphorothioate linkage
  modified_base 8^9: mod_base = OTHER; note = Methylphosphonate linkage
  misc_feature 1..32: note = RM109476

SEQ ID NO: 702 - DNA, 23 bp, synthetic construct
  source 1..23: mol_type = other DNA
  misc_feature 18..19: note = DNA
  misc_feature order(1..17,20..23): note = RNA
  modified_base 17: mod_base = OTHER; note = 2-Prime-O-Methoxyethyl modified 5-methyl Cytidine
  modified_base 18: mod_base = OTHER; note = DNA nucleotide carrying a 6-amino-5-nitro-3-yl-2(1H)-pyridone nucleobase
  modified_base 19: mod_base = OTHER; note = DNA nucleotide carrying a hypoxanthine nucleobase
  modified_base order(10..12,15,21..22): mod_base = OTHER; note = 2-Prime-Fluoro modified nucleoside
  modified_base order(1..9,13..14,16,20,23): mod_base = OTHER; note = 2-Prime-O-Methyl modified nucleoside
  modified_base order(1^2,22^23): mod_base = OTHER; note = (1,3-dimethylimidazolidin-2-ylidene) Phosphoramidate linkage
  modified_base order(2..19,20..22): mod_base = OTHER; note = Phosphorothioate linkage
  modified_base 19^20: mod_base = OTHER; note = Methylphosphonate linkage
  misc_feature 1..23: note = RM109477
ggggcatgatgccatacnntgcc

SEQ ID NO: 703 - DNA, 23 bp, synthetic construct
  source 1..23: mol_type = other DNA
  misc_feature 15..16: note = DNA
  misc_feature order(1..14,17..23): note = RNA
  modified_base 14: mod_base = OTHER; note = 2-Prime-O-Methoxyethyl modified 5-methyl Cytidine
  modified_base 15: mod_base = OTHER; note = DNA nucleotide carrying a 6-amino-5-nitro-3-yl-2(1H)-pyridone nucleobase
  modified_base 16: mod_base = OTHER; note = DNA nucleotide carrying a hypoxanthine nucleobase
  modified_base order(7..9,12,18..19): mod_base = OTHER; note = 2-Prime-Fluoro modified nucleoside
  modified_base order(1..6,10..11,13,17,20..23): mod_base = OTHER; note = 2-Prime-O-Methyl modified nucleoside
  modified_base order(1^2,22^23): mod_base = OTHER; note = (1,3-dimethylimidazolidin-2-ylidene) Phosphoramidate linkage
  modified_base order(2..16,17..22): mod_base = OTHER; note = Phosphorothioate linkage
  modified_base 16^17: mod_base = OTHER; note = Methylphosphonate linkage
  misc_feature 1..23: note = RM109478
gcatgatgccatacnntgccacc

SEQ ID NO: 704 - DNA, 23 bp, synthetic construct
  source 1..23: mol_type = other DNA
  misc_feature 12..13: note = DNA
  misc_feature order(1..11,14..23): note = RNA
  modified_base 11: mod_base = OTHER; note = 2-Prime-O-Methoxyethyl modified 5-methyl Cytidine
  modified_base 12: mod_base = OTHER; note = DNA nucleotide carrying a 6-amino-5-nitro-3-yl-2(1H)-pyridone nucleobase
  modified_base 13: mod_base = OTHER; note = DNA nucleotide carrying a hypoxanthine nucleobase
  modified_base order(4..6,9,15..16): mod_base = OTHER; note = 2-Prime-Fluoro modified nucleoside
  modified_base order(1..3,7..8,10,14,17..23): mod_base = OTHER; note = 2-Prime-O-Methyl modified nucleoside
  modified_base order(1^2,22^23): mod_base = OTHER; note = (1,3-dimethylimidazolidin-2-ylidene) Phosphoramidate linkage
  modified_base order(2..13,14..22): mod_base = OTHER; note = Phosphorothioate linkage
  modified_base 13^14: mod_base = OTHER; note = Methylphosphonate linkage
  misc_feature 1..23: note = RM109479
tgatgccatacnntgccaccagg

SEQ ID NO: 705 - DNA, 23 bp, synthetic construct
  source 1..23: mol_type = other DNA
  misc_feature 9..10: note = DNA
  misc_feature order(1..8,11..23): note = RNA
  modified_base 8: mod_base = OTHER; note = 2-Prime-O-Methoxyethyl modified 5-methyl Cytidine
  modified_base 9: mod_base = OTHER; note = DNA nucleotide carrying a 6-amino-5-nitro-3-yl-2(1H)-pyridone nucleobase
  modified_base 10: mod_base = OTHER; note = DNA nucleotide carrying a hypoxanthine nucleobase
  modified_base order(1..3,6,12..13): mod_base = OTHER; note = 2-Prime-Fluoro modified nucleoside
  modified_base order(4..5,7,11,14..23): mod_base = OTHER; note = 2-Prime-O-Methyl modified nucleoside
  modified_base order(1^2,22^23): mod_base = OTHER; note = (1,3-dimethylimidazolidin-2-ylidene) Phosphoramidate linkage
  modified_base order(2..10,11..22): mod_base = OTHER; note = Phosphorothioate linkage
  modified_base 10^11: mod_base = OTHER; note = Methylphosphonate linkage
  misc_feature 1..23: note = RM109480
tgccatacnntgccaccagggcg

SEQ ID NO: 706 - DNA, 32 bp, synthetic construct; identical to SEQ ID NO: 185
  source 1..32: mol_type = other DNA
  misc_feature 28..29: note = DNA
  misc_feature order(1..27,30..32): note = RNA
  modified_base 27: mod_base = OTHER; note = 2-Prime-O-Methoxyethyl modified 5-methyl Cytidine
  modified_base 28: mod_base = OTHER; note = DNA nucleotide carrying a 6-amino-5-nitro-3-yl-2(1H)-pyridone nucleobase
  modified_base 29: mod_base = OTHER; note = DNA nucleotide carrying a hypoxanthine nucleobase
  modified_base order(20..22,25,31..32): mod_base = OTHER; note = 2-Prime-Fluoro modified nucleoside
  modified_base order(1..19,23..24,26,30): mod_base = OTHER; note = 2-Prime-O-Methyl modified nucleoside
  modified_base order(1^2,31^32): mod_base = OTHER; note = (1,3-dimethylimidazolidin-2-ylidene) Phosphoramidate linkage
  modified_base order(2..29,30^31): mod_base = OTHER; note = Phosphorothioate linkage
  modified_base 29^30: mod_base = OTHER; note = Methylphosphonate linkage
  misc_feature 1..32: note = RM109481

SEQ ID NO: 707 - DNA, 32 bp, synthetic construct; identical to SEQ ID NO: 186
  source 1..32: mol_type = other DNA
  misc_feature 25..26: note = DNA
  misc_feature order(1..24,27..32): note = RNA
  modified_base 24: mod_base = OTHER; note = 2-Prime-O-Methoxyethyl modified 5-methyl Cytidine
  modified_base 25: mod_base = OTHER; note = DNA nucleotide carrying a 6-amino-5-nitro-3-yl-2(1H)-pyridone nucleobase
  modified_base 26: mod_base = OTHER; note = DNA nucleotide carrying a hypoxanthine nucleobase
  modified_base order(17..19,22,28..29): mod_base = OTHER; note = 2-Prime-Fluoro modified nucleoside
  modified_base order(1..16,20..21,23,27,30..32): mod_base = OTHER; note = 2-Prime-O-Methyl modified nucleoside
  modified_base order(1^2,31^32): mod_base = OTHER; note = (1,3-dimethylimidazolidin-2-ylidene) Phosphoramidate linkage
  modified_base order(2..26,27..31): mod_base = OTHER; note = Phosphorothioate linkage
  modified_base 26^27: mod_base = OTHER; note = Methylphosphonate linkage
  misc_feature 1..32: note = RM109482

SEQ ID NO: 708 - DNA, 32 bp, synthetic construct; identical to SEQ ID NO: 187
  source 1..32: mol_type = other DNA
  misc_feature 22..23: note = DNA
  misc_feature order(1..21,24..32): note = RNA
  modified_base 21: mod_base = OTHER; note = 2-Prime-O-Methoxyethyl modified 5-methyl Cytidine
  modified_base 22: mod_base = OTHER; note = DNA nucleotide carrying a 6-amino-5-nitro-3-yl-2(1H)-pyridone nucleobase
  modified_base 23: mod_base = OTHER; note = DNA nucleotide carrying a hypoxanthine nucleobase
  modified_base order(14..16,19,25..26): mod_base = OTHER; note = 2-Prime-Fluoro modified nucleoside
  modified_base order(1..13,17..18,20,24,27..32): mod_base = OTHER; note = 2-Prime-O-Methyl modified nucleoside
  modified_base order(1^2,31^32): mod_base = OTHER; note = (1,3-dimethylimidazolidin-2-ylidene) Phosphoramidate linkage
  modified_base order(2..23,24..31): mod_base = OTHER; note = Phosphorothioate linkage
  modified_base 23^24: mod_base = OTHER; note = Methylphosphonate linkage
  misc_feature 1..32: note = RM109483

SEQ ID NO: 709 - DNA, 32 bp, synthetic construct; identical to SEQ ID NO: 5
  source 1..32: mol_type = other DNA
  misc_feature 19..20: note = DNA
  misc_feature order(1..18,21..32): note = RNA
  modified_base 18: mod_base = OTHER; note = 2-Prime-O-Methoxyethyl modified 5-methyl Cytidine
  modified_base 19: mod_base = OTHER; note = DNA nucleotide carrying a 6-amino-5-nitro-3-yl-2(1H)-pyridone nucleobase
  modified_base 20: mod_base = OTHER; note = DNA nucleotide carrying a hypoxanthine nucleobase
  modified_base order(11..13,16,22..23): mod_base = OTHER; note = 2-Prime-Fluoro modified nucleoside
  modified_base order(1..10,14..15,17,21,24..32): mod_base = OTHER; note = 2-Prime-O-Methyl modified nucleoside
  modified_base order(1^2,31^32): mod_base = OTHER; note = (1,3-dimethylimidazolidin-2-ylidene) Phosphoramidate linkage
  modified_base order(2..20,21..31): mod_base = OTHER; note = Phosphorothioate linkage
  modified_base 20^21: mod_base = OTHER; note = Methylphosphonate linkage
  misc_feature 1..32: note = RM109484

SEQ ID NO: 710 - DNA, 32 bp, synthetic construct; identical to SEQ ID NO: 189
  source 1..32: mol_type = other DNA
  misc_feature 16..17: note = DNA
  misc_feature order(1..15,18..32): note = RNA
  modified_base 15: mod_base = OTHER; note = 2-Prime-O-Methoxyethyl modified 5-methyl Cytidine
  modified_base 16: mod_base = OTHER; note = DNA nucleotide carrying a 6-amino-5-nitro-3-yl-2(1H)-pyridone nucleobase
  modified_base 17: mod_base = OTHER; note = DNA nucleotide carrying a hypoxanthine nucleobase
  modified_base order(8..10,13,19..20): mod_base = OTHER; note = 2-Prime-Fluoro modified nucleoside
  modified_base order(1..7,11..12,14,18,21..32): mod_base = OTHER; note = 2-Prime-O-Methyl modified nucleoside
  modified_base order(1^2,31^32): mod_base = OTHER; note = (1,3-dimethylimidazolidin-2-ylidene) Phosphoramidate linkage
  modified_base order(2..17,18..31): mod_base = OTHER; note = Phosphorothioate linkage
  modified_base 17^18: mod_base = OTHER; note = Methylphosphonate linkage
  misc_feature 1..32: note = RM109485

SEQ ID NO: 711 - DNA, 32 bp, synthetic construct; identical to SEQ ID NO: 190
  source 1..32: mol_type = other DNA
  misc_feature 13..14: note = DNA
  misc_feature order(1..12,15..32): note = RNA
  modified_base 12: mod_base = OTHER; note = 2-Prime-O-Methoxyethyl modified 5-methyl Cytidine
  modified_base 13: mod_base = OTHER; note = DNA nucleotide carrying a 6-amino-5-nitro-3-yl-2(1H)-pyridone nucleobase
  modified_base 14: mod_base = OTHER; note = DNA nucleotide carrying a hypoxanthine nucleobase
  modified_base order(5..7,10,16..17): mod_base = OTHER; note = 2-Prime-Fluoro modified nucleoside
  modified_base order(1..4,8..9,11,15,18..32): mod_base = OTHER; note = 2-Prime-O-Methyl modified nucleoside
  modified_base order(1^2,31^32): mod_base = OTHER; note = (1,3-dimethylimidazolidin-2-ylidene) Phosphoramidate linkage
  modified_base order(2..14,15..31): mod_base = OTHER; note = Phosphorothioate linkage
  modified_base 14^15: mod_base = OTHER; note = Methylphosphonate linkage
  misc_feature 1..32: note = RM109486

SEQ ID NO: 712 - DNA, 32 bp, synthetic construct; identical to SEQ ID NO: 191
  source 1..32: mol_type = other DNA
  misc_feature 10..11: note = DNA
  misc_feature order(1..9,12..32): note = RNA
  modified_base 9: mod_base = OTHER; note = 2-Prime-O-Methoxyethyl modified 5-methyl Cytidine
  modified_base 10: mod_base = OTHER; note = DNA nucleotide carrying a 6-amino-5-nitro-3-yl-2(1H)-pyridone nucleobase
  modified_base 11: mod_base = OTHER; note = DNA nucleotide carrying a hypoxanthine nucleobase
  modified_base order(2..4,7,13..14): mod_base = OTHER; note = 2-Prime-Fluoro modified nucleoside
  modified_base order(1,5..6,8,12,15..32): mod_base = OTHER; note = 2-Prime-O-Methyl modified nucleoside
  modified_base order(1^2,31^32): mod_base = OTHER; note = (1,3-dimethylimidazolidin-2-ylidene) Phosphoramidate linkage
  modified_base order(2..11,12..31): mod_base = OTHER; note = Phosphorothioate linkage
  modified_base 11^12: mod_base = OTHER; note = Methylphosphonate linkage
  misc_feature 1..32: note = RM109487

SEQ ID NO: 713 - DNA, 26 bp, synthetic construct
  source 1..26: mol_type = other DNA
  misc_feature 22..23: note = DNA
  misc_feature order(1..21,24..26): note = RNA
  modified_base 21: mod_base = OTHER; note = 2-Prime-O-Methoxyethyl modified 5-methyl Cytidine
  modified_base 22: mod_base = OTHER; note = DNA nucleotide carrying a 6-amino-5-nitro-3-yl-2(1H)-pyridone nucleobase
  modified_base 23: mod_base = OTHER; note = DNA nucleotide carrying a hypoxanthine nucleobase
  modified_base order(1,4,11,14,17,25..26): mod_base = OTHER; note = 2-Prime-Fluoro modified nucleoside
  modified_base order(2..3,5..10,12..13,15..16,18..20,24): mod_base = OTHER; note = 2-Prime-O-Methyl modified nucleoside
  modified_base order(1^2,25^26): mod_base = OTHER; note = (1,3-dimethylimidazolidin-2-ylidene) Phosphoramidate linkage
  modified_base order(2..23,24^25): mod_base = OTHER; note = Phosphorothioate linkage
  modified_base 23^24: mod_base = OTHER; note = Methylphosphonate linkage
  misc_feature 1..26: note = RM109488
gtgaggggcatgatgccatacnntgc

SEQ ID NO: 714 - DNA, 26 bp, synthetic construct
  source 1..26: mol_type = other DNA
  misc_feature 22..23: note = DNA
  misc_feature order(1..21,24..26): note = RNA
  modified_base 21: mod_base = OTHER; note = 2-Prime-O-Methoxyethyl modified 5-methyl Cytidine
  modified_base 22: mod_base = OTHER; note = DNA nucleotide carrying a 6-amino-5-nitro-3-yl-2(1H)-pyridone nucleobase
  modified_base 23: mod_base = OTHER; note = DNA nucleotide carrying a hypoxanthine nucleobase
  modified_base order(4,11,14,17,25): mod_base = OTHER; note = 2-Prime-Fluoro modified nucleoside
  modified_base order(1..3,5..10,12..13,15..16,18..20,24,26): mod_base = OTHER; note = 2-Prime-O-Methyl modified nucleoside
  modified_base order(1^2,25^26): mod_base = OTHER; note = (1,3-dimethylimidazolidin-2-ylidene) Phosphoramidate linkage
  modified_base order(2..23,24^25): mod_base = OTHER; note = Phosphorothioate linkage
  modified_base 23^24: mod_base = OTHER; note = Methylphosphonate linkage
  misc_feature 1..26: note = RM109489
gtgaggggcatgatgccatacnntgc

SEQ ID NO: 715 - DNA, 26 bp, synthetic construct
  source 1..26: mol_type = other DNA
  misc_feature 19..20: note = DNA
  misc_feature order(1..18,21..26): note = RNA
  modified_base 18: mod_base = OTHER; note = 2-Prime-O-Methoxyethyl modified 5-methyl Cytidine
  modified_base 19: mod_base = OTHER; note = DNA nucleotide carrying a 6-amino-5-nitro-3-yl-2(1H)-pyridone nucleobase
  modified_base 20: mod_base = OTHER; note = DNA nucleotide carrying a hypoxanthine nucleobase
  modified_base order(1,8,11,14,22): mod_base = OTHER; note = 2-Prime-Fluoro modified nucleoside
  modified_base order(2..7,9..10,12..13,15..17,21,23..26): mod_base = OTHER; note = 2-Prime-O-Methyl modified nucleoside
  modified_base order(1^2,25^26): mod_base = OTHER; note = (1,3-dimethylimidazolidin-2-ylidene) Phosphoramidate linkage
  modified_base order(2..20,21..25): mod_base = OTHER; note = Phosphorothioate linkage
  modified_base 20^21: mod_base = OTHER; note = Methylphosphonate linkage
  misc_feature 1..26: note = RM109490
aggggcatgatgccatacnntgccac

SEQ ID NO: 716 - DNA, 29 bp, synthetic construct
  source 1..29: mol_type = other DNA
  misc_feature 24..25: note = DNA
  misc_feature order(1..23,26..29): note = RNA
  modified_base 23: mod_base = OTHER; note = 2-Prime-O-Methoxyethyl modified 5-methyl Cytidine
  modified_base 24: mod_base = OTHER; note = DNA nucleotide carrying a 6-amino-5-nitro-3-yl-2(1H)-pyridone nucleobase
  modified_base 25: mod_base = OTHER; note = DNA nucleotide carrying a hypoxanthine nucleobase
  modified_base order(6,13,16,19,27): mod_base = OTHER; note = 2-Prime-Fluoro modified nucleoside
  modified_base order(1..5,7..12,14..15,17..18,20..22,26,28..29): mod_base = OTHER; note = 2-Prime-O-Methyl modified nucleoside
  modified_base order(1^2,28^29): mod_base = OTHER; note = (1,3-dimethylimidazolidin-2-ylidene) Phosphoramidate linkage
  modified_base order(2..25,26..28): mod_base = OTHER; note = Phosphorothioate linkage
  modified_base 25^26: mod_base = OTHER; note = Methylphosphonate linkage
  misc_feature 1..29: note = RM109491
ccgtgaggggcatgatgccatacnntgcc

SEQ ID NO: 717 - DNA, 29 bp, synthetic construct
  source 1..29: mol_type = other DNA
  misc_feature 21..22: note = DNA
  misc_feature order(1..20,23..29): note = RNA
  modified_base 20: mod_base = OTHER; note = 2-Prime-O-Methoxyethyl modified 5-methyl Cytidine
  modified_base 21: mod_base = OTHER; note = DNA nucleotide carrying a 6-amino-5-nitro-3-yl-2(1H)-pyridone nucleobase
  modified_base 22: mod_base = OTHER; note = DNA nucleotide carrying a hypoxanthine nucleobase
  modified_base order(3,10,13,16,24): mod_base = OTHER; note = 2-Prime-Fluoro modified nucleoside
  modified_base order(1..2,4..9,11..12,14..15,17..19,23,25..29): mod_base = OTHER; note = 2-Prime-O-Methyl modified nucleoside
  modified_base order(1^2,28^29): mod_base = OTHER; note = (1,3-dimethylimidazolidin-2-ylidene) Phosphoramidate linkage
  modified_base order(2..22,23..28): mod_base = OTHER; note = Phosphorothioate linkage
  modified_base 22^23: mod_base = OTHER; note = Methylphosphonate linkage
  misc_feature 1..29: note = RM109492
tgaggggcatgatgccatacnntgccacc

SEQ ID NO: 718 - DNA, 23 bp, synthetic construct
  source 1..23: mol_type = other DNA
  misc_feature 18..19: note = DNA
  misc_feature order(1..17,20..23): note = RNA
  modified_base 17: mod_base = OTHER; note = 2-Prime-O-Methoxyethyl modified 5-methyl Cytidine
  modified_base 18: mod_base = OTHER; note = DNA nucleotide carrying a 6-amino-5-nitro-3-yl-2(1H)-pyridone nucleobase
  modified_base 19: mod_base = OTHER; note = DNA nucleotide carrying a hypoxanthine nucleobase
  modified_base order(13,21): mod_base = OTHER; note = 2-Prime-Fluoro modified nucleoside
  modified_base order(1..12,14..16,20,22..23): mod_base = OTHER; note = 2-Prime-O-Methyl modified nucleoside
  modified_base order(1^2,22^23): mod_base = OTHER; note = (1,3-dimethylimidazolidin-2-ylidene) Phosphoramidate linkage
  modified_base order(2..19,20..22): mod_base = OTHER; note = Phosphorothioate linkage
  modified_base 19^20: mod_base = OTHER; note = Methylphosphonate linkage
  misc_feature 1..23: note = RM109493
ggggcatgatgccatacnntgcc

SEQ ID NO: 719 - DNA, 23 bp, synthetic construct
  source 1..23: mol_type = other DNA
  misc_feature 15..16: note = DNA
  misc_feature order(1..14,17..23): note = RNA
  modified_base 14: mod_base = OTHER; note = 2-Prime-O-Methoxyethyl modified 5-methyl Cytidine
  modified_base 15: mod_base = OTHER; note = DNA nucleotide carrying a 6-amino-5-nitro-3-yl-2(1H)-pyridone nucleobase
  modified_base 16: mod_base = OTHER; note = DNA nucleotide carrying a hypoxanthine nucleobase
  modified_base order(10,18): mod_base = OTHER; note = 2-Prime-Fluoro modified nucleoside
  modified_base order(1..9,11..13,17,19..23): mod_base = OTHER; note = 2-Prime-O-Methyl modified nucleoside
  modified_base order(1^2,22^23): mod_base = OTHER; note = (1,3-dimethylimidazolidin-2-ylidene) Phosphoramidate linkage
  modified_base order(2..16,17..22): mod_base = OTHER; note = Phosphorothioate linkage
  modified_base 16^17: mod_base = OTHER; note = Methylphosphonate linkage
  misc_feature 1..23: note = RM109494
gcatgatgccatacnntgccacc

SEQ ID NO: 720 - DNA, 23 bp, synthetic construct
  source 1..23: mol_type = other DNA
  misc_feature 12..13: note = DNA
  misc_feature order(1..11,14..23): note = RNA
  modified_base 11: mod_base = OTHER; note = 2-Prime-O-Methoxyethyl modified 5-methyl Cytidine
  modified_base 12: mod_base = OTHER; note = DNA nucleotide carrying a 6-amino-5-nitro-3-yl-2(1H)-pyridone nucleobase
  modified_base 13: mod_base = OTHER; note = DNA nucleotide carrying a hypoxanthine nucleobase
  modified_base order(7,15): mod_base = OTHER; note = 2-Prime-Fluoro modified nucleoside
  modified_base order(1..6,8..10,14,16..23): mod_base = OTHER; note = 2-Prime-O-Methyl modified nucleoside
  modified_base order(1^2,22^23): mod_base = OTHER; note = (1,3-dimethylimidazolidin-2-ylidene) Phosphoramidate linkage
  modified_base order(2..13,14..22): mod_base = OTHER; note = Phosphorothioate linkage
  modified_base 13^14: mod_base = OTHER; note = Methylphosphonate linkage
  misc_feature 1..23: note = RM109495
tgatgccatacnntgccaccagg

SEQ ID NO: 721 - DNA, 23 bp, synthetic construct
  source 1..23: mol_type = other DNA
  misc_feature 9..10: note = DNA
  misc_feature order(1..8,11..23): note = RNA
  modified_base 8: mod_base = OTHER; note = 2-Prime-O-Methoxyethyl modified 5-methyl Cytidine
  modified_base 9: mod_base = OTHER; note = DNA nucleotide carrying a 6-amino-5-nitro-3-yl-2(1H)-pyridone nucleobase
  modified_base 10: mod_base = OTHER; note = DNA nucleotide carrying a hypoxanthine nucleobase
  modified_base order(4,12): mod_base = OTHER; note = 2-Prime-Fluoro modified nucleoside
  modified_base order(1..3,5..7,11,13..23): mod_base = OTHER; note = 2-Prime-O-Methyl modified nucleoside
  modified_base order(1^2,22^23): mod_base = OTHER; note = (1,3-dimethylimidazolidin-2-ylidene) Phosphoramidate linkage
  modified_base order(2..10,11..22): mod_base = OTHER; note = Phosphorothioate linkage
  modified_base 10^11: mod_base = OTHER; note = Methylphosphonate linkage
  misc_feature 1..23: note = RM109496
tgccatacnntgccaccagggcg

SEQ ID NO: 722 - DNA, 23 bp, synthetic construct
  source 1..23: mol_type = other DNA
  misc_feature 6..7: note = DNA
  misc_feature order(1..5,8..23): note = RNA
  modified_base 5: mod_base = OTHER; note = 2-Prime-O-Methoxyethyl modified 5-methyl Cytidine
  modified_base 6: mod_base = OTHER; note = DNA nucleotide carrying a 6-amino-5-nitro-3-yl-2(1H)-pyridone nucleobase
  modified_base 7: mod_base = OTHER; note = DNA nucleotide carrying a hypoxanthine nucleobase
  modified_base order(1,9): mod_base = OTHER; note = 2-Prime-Fluoro modified nucleoside
  modified_base order(2..4,8,10..23): mod_base = OTHER; note = 2-Prime-O-Methyl modified nucleoside
  modified_base order(1^2,22^23): mod_base = OTHER; note = (1,3-dimethylimidazolidin-2-ylidene) Phosphoramidate linkage
  modified_base order(2..7,8..22): mod_base = OTHER; note = Phosphorothioate linkage
  modified_base 7^8: mod_base = OTHER; note = Methylphosphonate linkage
  misc_feature 1..23: note = RM109497
catacnntgccaccagggcgatg

SEQ ID NO: 723 - DNA, 26 bp, synthetic construct
  source 1..26: mol_type = other DNA
  misc_feature 22..23: note = DNA
  misc_feature order(1..21,24..26): note = RNA
  modified_base 21: mod_base = OTHER; note = 2-Prime-O-Methoxyethyl modified 5-methyl Cytidine
  modified_base 22: mod_base = OTHER; note = DNA nucleotide carrying a 6-amino-5-nitro-3-yl-2(1H)-pyridone nucleobase
  modified_base 23: mod_base = OTHER; note = DNA nucleotide carrying a hypoxanthine nucleobase
  modified_base order(17,25): mod_base = OTHER; note = 2-Prime-Fluoro modified nucleoside
  modified_base order(1..16,18..20,24,26): mod_base = OTHER; note = 2-Prime-O-Methyl modified nucleoside
  modified_base order(1^2,25^26): mod_base = OTHER; note = (1,3-dimethylimidazolidin-2-ylidene) Phosphoramidate linkage
  modified_base order(2..23,24^25): mod_base = OTHER; note = Phosphorothioate linkage
  modified_base 23^24: mod_base = OTHER; note = Methylphosphonate linkage
  misc_feature 1..26: note = RM109498
gtgaggggcatgatgccatacnntgc

SEQ ID NO: 724 - DNA, 26 bp, synthetic construct
  source 1..26: mol_type = other DNA
  misc_feature 19..20: note = DNA
  misc_feature order(1..18,21..26): note = RNA
  modified_base 18: mod_base = OTHER; note = 2-Prime-O-Methoxyethyl modified 5-methyl Cytidine
  modified_base 19: mod_base = OTHER; note = DNA nucleotide carrying a 6-amino-5-nitro-3-yl-2(1H)-pyridone nucleobase
  modified_base 20: mod_base = OTHER; note = DNA nucleotide carrying a hypoxanthine nucleobase
  modified_base order(14,22): mod_base = OTHER; note = 2-Prime-Fluoro modified nucleoside
  modified_base order(1..13,15..17,21,23..26): mod_base = OTHER; note = 2-Prime-O-Methyl modified nucleoside
  modified_base order(1^2,25^26): mod_base = OTHER; note = (1,3-dimethylimidazolidin-2-ylidene) Phosphoramidate linkage
  modified_base order(2..20,21..25): mod_base = OTHER; note = Phosphorothioate linkage
  modified_base 20^21: mod_base = OTHER; note = Methylphosphonate linkage
  misc_feature 1..26: note = RM109499
aggggcatgatgccatacnntgccac

SEQ ID NO: 725 - DNA, 26 bp, synthetic construct
  source 1..26: mol_type = other DNA
  misc_feature 16..17: note = DNA
  misc_feature order(1..15,18..26): note = RNA
  modified_base 15: mod_base = OTHER; note = 2-Prime-O-Methoxyethyl modified 5-methyl Cytidine
  modified_base 16: mod_base = OTHER; note = DNA nucleotide carrying a 6-amino-5-nitro-3-yl-2(1H)-pyridone nucleobase
  modified_base 17: mod_base = OTHER; note = DNA nucleotide carrying a hypoxanthine nucleobase
  modified_base order(11,19): mod_base = OTHER; note = 2-Prime-Fluoro modified nucleoside
  modified_base order(1..10,12..14,18,20..26): mod_base = OTHER; note = 2-Prime-O-Methyl modified nucleoside
  modified_base order(1^2,25^26): mod_base = OTHER; note = (1,3-dimethylimidazolidin-2-ylidene) Phosphoramidate linkage
  modified_base order(2..17,18..25): mod_base = OTHER; note = Phosphorothioate linkage
  modified_base 17^18: mod_base = OTHER; note = Methylphosphonate linkage
  misc_feature 1..26: note = RM109500
ggcatgatgccatacnntgccaccag

SEQ ID NO: 726 - DNA, 26 bp, synthetic construct
  source 1..26: mol_type = other DNA
  misc_feature 13..14: note = DNA
  misc_feature order(1..12,15..26): note = RNA
  modified_base 12: mod_base = OTHER; note = 2-Prime-O-Methoxyethyl modified 5-methyl Cytidine
  modified_base 13: mod_base = OTHER; note = DNA nucleotide carrying a 6-amino-5-nitro-3-yl-2(1H)-pyridone nucleobase
  modified_base 14: mod_base = OTHER; note = DNA nucleotide carrying a hypoxanthine nucleobase
  modified_base order(8,16): mod_base = OTHER; note = 2-Prime-Fluoro modified nucleoside
  modified_base order(1..7,9..11,15,17..26): mod_base = OTHER; note = 2-Prime-O-Methyl modified nucleoside
  modified_base order(1^2,25^26): mod_base = OTHER; note = (1,3-dimethylimidazolidin-2-ylidene) Phosphoramidate linkage
  modified_base order(2..14,15..25): mod_base = OTHER; note = Phosphorothioate linkage
  modified_base 14^15: mod_base = OTHER; note = Methylphosphonate linkage
  misc_feature 1..26: note = RM109501
atgatgccatacnntgccaccagggc

SEQ ID NO: 727 - DNA, 26 bp, synthetic construct
  source 1..26: mol_type = other DNA
  misc_feature 10..11: note = DNA
  misc_feature order(1..9,12..26): note = RNA
  modified_base 9: mod_base = OTHER; note = 2-Prime-O-Methoxyethyl modified 5-methyl Cytidine
  modified_base 10: mod_base = OTHER; note = DNA nucleotide carrying a 6-amino-5-nitro-3-yl-2(1H)-pyridone nucleobase
  modified_base 11: mod_base = OTHER; note = DNA nucleotide carrying a hypoxanthine nucleobase
  modified_base order(5,13): mod_base = OTHER; note = 2-Prime-Fluoro modified nucleoside
  modified_base order(1..4,6..8,12,14..26): mod_base = OTHER; note = 2-Prime-O-Methyl modified nucleoside
  modified_base order(1^2,25^26): mod_base = OTHER; note = (1,3-dimethylimidazolidin-2-ylidene) Phosphoramidate linkage
  modified_base order(2..11,12..25): mod_base = OTHER; note = Phosphorothioate linkage
  modified_base 11^12: mod_base = OTHER; note = Methylphosphonate linkage
  misc_feature 1..26: note = RM109502
atgccatacnntgccaccagggcgat

SEQ ID NO: 728 - DNA, 26 bp, synthetic construct
  source 1..26: mol_type = other DNA
  misc_feature 7..8: note = DNA
  misc_feature order(1..6,9..26): note = RNA
  modified_base 6: mod_base = OTHER; note = 2-Prime-O-Methoxyethyl modified 5-methyl Cytidine
  modified_base 7: mod_base = OTHER; note = DNA nucleotide carrying a 6-amino-5-nitro-3-yl-2(1H)-pyridone nucleobase
  modified_base 8: mod_base = OTHER; note = DNA nucleotide carrying a hypoxanthine nucleobase
  modified_base order(2,10): mod_base = OTHER; note = 2-Prime-Fluoro modified nucleoside
  modified_base order(1,3..5,9,11..26): mod_base = OTHER; note = 2-Prime-O-Methyl modified nucleoside
  modified_base order(1^2,25^26): mod_base = OTHER; note = (1,3-dimethylimidazolidin-2-ylidene) Phosphoramidate linkage
  modified_base order(2..8,9..25): mod_base = OTHER; note = Phosphorothioate linkage
  modified_base 8^9: mod_base = OTHER; note = Methylphosphonate linkage
  misc_feature 1..26: note = RM109503
ccatacnntgccaccagggcgatggc

SEQ ID NO: 729 - DNA, 29 bp, synthetic construct
  source 1..29: mol_type = other DNA
  misc_feature 24..25: note = DNA
  misc_feature order(1..23,26..29): note = RNA
  modified_base 23: mod_base = OTHER; note = 2-Prime-O-Methoxyethyl modified 5-methyl Cytidine
  modified_base 24: mod_base = OTHER; note = DNA nucleotide carrying a 6-amino-5-nitro-3-yl-2(1H)-pyridone nucleobase
  modified_base 25: mod_base = OTHER; note = DNA nucleotide carrying a hypoxanthine nucleobase
  modified_base order(19,27): mod_base = OTHER; note = 2-Prime-Fluoro modified nucleoside
  modified_base order(1..18,20..22,26,28..29): mod_base = OTHER; note = 2-Prime-O-Methyl modified nucleoside
  modified_base order(1^2,28^29): mod_base = OTHER; note = (1,3-dimethylimidazolidin-2-ylidene) Phosphoramidate linkage
  modified_base order(2..25,26..28): mod_base = OTHER; note = Phosphorothioate linkage
  modified_base 25^26: mod_base = OTHER; note = Methylphosphonate linkage
  misc_feature 1..29: note = RM109504
ccgtgaggggcatgatgccatacnntgcc

SEQ ID NO: 730 - DNA, 29 bp, synthetic construct
  source 1..29: mol_type = other DNA
  misc_feature 21..22: note = DNA
  misc_feature order(1..20,23..29): note = RNA
  modified_base 20: mod_base = OTHER; note = 2-Prime-O-Methoxyethyl modified 5-methyl Cytidine
  modified_base 21: mod_base = OTHER; note = DNA nucleotide carrying a 6-amino-5-nitro-3-yl-2(1H)-pyridone nucleobase
  modified_base 22: mod_base = OTHER; note = DNA nucleotide carrying a hypoxanthine nucleobase
  modified_base order(16,24): mod_base = OTHER; note = 2-Prime-Fluoro modified nucleoside
  modified_base order(1..15,17..19,23,25..29): mod_base = OTHER; note = 2-Prime-O-Methyl modified nucleoside
  modified_base order(1^2,28^29): mod_base = OTHER; note = (1,3-dimethylimidazolidin-2-ylidene) Phosphoramidate linkage
  modified_base order(2..22,23..28): mod_base = OTHER; note = Phosphorothioate linkage
  modified_base 22^23: mod_base = OTHER; note = Methylphosphonate linkage
  misc_feature 1..29: note = RM109505
tgaggggcatgatgccatacnntgccacc

SEQ ID NO: 731 - DNA, 29 bp, synthetic construct
  source 1..29: mol_type = other DNA
  misc_feature 18..19: note = DNA
  misc_feature order(1..17,20..29): note = RNA
  modified_base 17: mod_base = OTHER; note = 2-Prime-O-Methoxyethyl modified 5-methyl Cytidine
  modified_base 18: mod_base = OTHER; note = DNA nucleotide carrying a 6-amino-5-nitro-3-yl-2(1H)-pyridone nucleobase
  modified_base 19: mod_base = OTHER; note = DNA nucleotide carrying a hypoxanthine nucleobase
  modified_base order(13,21): mod_base = OTHER; note = 2-Prime-Fluoro modified nucleoside
  modified_base order(1..12,14..16,20,22..29): mod_base = OTHER; note = 2-Prime-O-Methyl modified nucleoside
  modified_base order(1^2,28^29): mod_base = OTHER; note = (1,3-dimethylimidazolidin-2-ylidene) Phosphoramidate linkage
  modified_base order(2..19,20..28): mod_base = OTHER; note = Phosphorothioate linkage
  modified_base 19^20: mod_base = OTHER; note = Methylphosphonate linkage
  misc_feature 1..29: note = RM109506
ggggcatgatgccatacnntgccaccagg

SEQ ID NO: 732 - DNA, 29 bp, synthetic construct
  source 1..29: mol_type = other DNA
  misc_feature 15..16: note = DNA
  misc_feature order(1..14,17..29): note = RNA
  modified_base 14: mod_base = OTHER; note = 2-Prime-O-Methoxyethyl modified 5-methyl Cytidine
  modified_base 15: mod_base = OTHER; note = DNA nucleotide carrying a 6-amino-5-nitro-3-yl-2(1H)-pyridone nucleobase
  modified_base 16: mod_base = OTHER; note = DNA nucleotide carrying a hypoxanthine nucleobase
  modified_base order(10,18): mod_base = OTHER; note = 2-Prime-Fluoro modified nucleoside
  modified_base order(1..9,11..13,17,19..29): mod_base = OTHER; note = 2-Prime-O-Methyl modified nucleoside
  modified_base order(1^2,28^29): mod_base = OTHER; note = (1,3-dimethylimidazolidin-2-ylidene) Phosphoramidate linkage
  modified_base order(2..16,17..28): mod_base = OTHER; note = Phosphorothioate linkage
  modified_base 16^17: mod_base = OTHER; note = Methylphosphonate linkage
  misc_feature 1..29: note = RM109507
gcatgatgccatacnntgccaccagggcg

SEQ ID NO: 733 - DNA, 29 bp, synthetic construct
  source 1..29: mol_type = other DNA
  misc_feature 12..13: note = DNA
  misc_feature order(1..11,14..29): note = RNA
  modified_base 11: mod_base = OTHER; note = 2-Prime-O-Methoxyethyl modified 5-methyl Cytidine
  modified_base 12: mod_base = OTHER; note = DNA nucleotide carrying a 6-amino-5-nitro-3-yl-2(1H)-pyridone nucleobase
  modified_base 13: mod_base = OTHER; note = DNA nucleotide carrying a hypoxanthine nucleobase
  modified_base order(7,15): mod_base = OTHER; note = 2-Prime-Fluoro modified nucleoside
  modified_base order(1..6,8..10,14,16..29): mod_base = OTHER; note = 2-Prime-O-Methyl modified nucleoside
  modified_base order(1^2,28^29): mod_base = OTHER; note = (1,3-dimethylimidazolidin-2-ylidene) Phosphoramidate linkage
  modified_base order(2..13,14..28): mod_base = OTHER; note = Phosphorothioate linkage
  modified_base 13^14: mod_base = OTHER; note = Methylphosphonate linkage
  misc_feature 1..29: note = RM109508
tgatgccatacnntgccaccagggcgatg

SEQ ID NO: 734 - DNA, 29 bp, synthetic construct
  source 1..29: mol_type = other DNA
  misc_feature 9..10: note = DNA
  misc_feature order(1..8,11..29): note = RNA
  modified_base 8: mod_base = OTHER; note = 2-Prime-O-Methoxyethyl modified 5-methyl Cytidine
  modified_base 9: mod_base = OTHER; note = DNA nucleotide carrying a 6-amino-5-nitro-3-yl-2(1H)-pyridone nucleobase
  modified_base 10: mod_base = OTHER; note = DNA nucleotide carrying a hypoxanthine nucleobase
  modified_base order(4,12): mod_base = OTHER; note = 2-Prime-Fluoro modified nucleoside
  modified_base order(1..3,5..7,11,13..29): mod_base = OTHER; note = 2-Prime-O-Methyl modified nucleoside
  modified_base order(1^2,28^29): mod_base = OTHER; note = (1,3-dimethylimidazolidin-2-ylidene) Phosphoramidate linkage
  modified_base order(2..10,11..28): mod_base = OTHER; note = Phosphorothioate linkage
  modified_base 10^11: mod_base = OTHER; note = Methylphosphonate linkage
  misc_feature 1..29: note = RM109509
tgccatacnntgccaccagggcgatggcc

SEQ ID NO: 735 - DNA, 29 bp, synthetic construct
  source 1..29: mol_type = other DNA
  misc_feature 6..7: note = DNA
  misc_feature order(1..5,8..29): note = RNA
  modified_base 5: mod_base = OTHER; note = 2-Prime-O-Methoxyethyl modified 5-methyl Cytidine
  modified_base 6: mod_base = OTHER; note = DNA nucleotide carrying a 6-amino-5-nitro-3-yl-2(1H)-pyridone nucleobase
  modified_base 7: mod_base = OTHER; note = DNA nucleotide carrying a hypoxanthine nucleobase
  modified_base order(1,9): mod_base = OTHER; note = 2-Prime-Fluoro modified nucleoside
  modified_base order(2..4,8,10..29): mod_base = OTHER; note = 2-Prime-O-Methyl modified nucleoside
  modified_base order(1^2,28^29): mod_base = OTHER; note = (1,3-dimethylimidazolidin-2-ylidene) Phosphoramidate linkage
  modified_base order(2..7,8..28): mod_base = OTHER; note = Phosphorothioate linkage
  modified_base 7^8: mod_base = OTHER; note = Methylphosphonate linkage
  misc_feature 1..29: note = RM109510
catacnntgccaccagggcgatggccagc

SEQ ID NO: 736 - DNA, 32 bp, synthetic construct; identical to SEQ ID NO: 5
  source 1..32: mol_type = other DNA
  misc_feature 19..20: note = DNA
  misc_feature order(1..18,21..32): note = RNA
  modified_base 18: mod_base = OTHER; note = 2-Prime-O-Methoxyethyl modified 5-methyl Cytidine
  modified_base 19: mod_base = OTHER; note = DNA nucleotide carrying a 6-amino-5-nitro-3-yl-2(1H)-pyridone nucleobase
  modified_base 20: mod_base = OTHER; note = DNA nucleotide carrying a hypoxanthine nucleobase
  modified_base order(2,5,8,10,17,22,25,27,32): mod_base = OTHER; note = 2-Prime-Fluoro modified nucleoside
  modified_base order(1,3..4,6..7,9,11..16,21,23..24,26,28..31): mod_base = OTHER; note = 2-Prime-O-Methyl modified nucleoside
  modified_base order(1^2,31^32): mod_base = OTHER; note = (1,3-dimethylimidazolidin-2-ylidene) Phosphoramidate linkage
  modified_base order(2..20,21..31): mod_base = OTHER; note = Phosphorothioate linkage
  modified_base 20^21: mod_base = OTHER; note = Methylphosphonate linkage
  misc_feature 1..32: note = RM109511

SEQ ID NO: 737 - DNA, 32 bp, synthetic construct; identical to SEQ ID NO: 190
  source 1..32: mol_type = other DNA
  misc_feature 13..14: note = DNA
  misc_feature order(1..12,15..32): note = RNA
  modified_base 12: mod_base = OTHER; note = 2-Prime-O-Methoxyethyl modified 5-methyl Cytidine
  modified_base 13: mod_base = OTHER; note = DNA nucleotide carrying a 6-amino-5-nitro-3-yl-2(1H)-pyridone nucleobase
  modified_base 14: mod_base = OTHER; note = DNA nucleotide carrying a hypoxanthine nucleobase
  modified_base order(2,7,9,16..17,24,26,29,32): mod_base = OTHER; note = 2-Prime-Fluoro modified nucleoside
  modified_base order(1,3..6,8,10..11,15,18..23,25,27..28,30..31): mod_base = OTHER; note = 2-Prime-O-Methyl modified nucleoside
  modified_base order(1^2,31^32): mod_base = OTHER; note = (1,3-dimethylimidazolidin-2-ylidene) Phosphoramidate linkage
  modified_base order(2..14,15..31): mod_base = OTHER; note = Phosphorothioate linkage
  modified_base 14^15: mod_base = OTHER; note = Methylphosphonate linkage
  misc_feature 1..32: note = RM109512

SEQ ID NO: 738 - DNA, 23 bp, synthetic construct
  source 1..23: mol_type = other DNA
  misc_feature 15..16: note = DNA
  misc_feature order(1..14,17..23): note = RNA
  modified_base 14: mod_base = OTHER; note = 2-Prime-O-Methoxyethyl modified 5-methyl Cytidine
  modified_base 15: mod_base = OTHER; note = DNA nucleotide carrying a 6-amino-5-nitro-3-yl-2(1H)-pyridone nucleobase
  modified_base 16: mod_base = OTHER; note = DNA nucleotide carrying a hypoxanthine nucleobase
  modified_base order(1,4,6,13,18,21): mod_base = OTHER; note = 2-Prime-Fluoro modified nucleoside
  modified_base order(2..3,5,7..12,17,19..20,22..23): mod_base = OTHER; note = 2-Prime-O-Methyl modified nucleoside
  modified_base order(1^2,22^23): mod_base = OTHER; note = (1,3-dimethylimidazolidin-2-ylidene) Phosphoramidate linkage
  modified_base order(2..16,17..22): mod_base = OTHER; note = Phosphorothioate linkage
  modified_base 16^17: mod_base = OTHER; note = Methylphosphonate linkage
  misc_feature 1..23: note = RM109513
gcatgatgccatacnntgccacc

SEQ ID NO: 739 - DNA, 32 bp, synthetic construct; identical to SEQ ID NO: 186
  source 1..32: mol_type = other DNA
  misc_feature 25..26: note = DNA
  misc_feature order(1..24,27..32): note = RNA
  modified_base 24: mod_base = OTHER; note = 2-Prime-O-Methoxyethyl modified 5-methyl Cytidine
  modified_base 25: mod_base = OTHER; note = DNA nucleotide carrying a 6-amino-5-nitro-3-yl-2(1H)-pyridone nucleobase
  modified_base 26: mod_base = OTHER; note = DNA nucleotide carrying a hypoxanthine nucleobase
  modified_base order(11,14,16,23,28,31): mod_base = OTHER; note = 2-Prime-Fluoro modified nucleoside
  modified_base order(1..10,12..13,15,17..22,27,29..30,32): mod_base = OTHER; note = 2-Prime-O-Methyl modified nucleoside
  modified_base order(1^2,31^32): mod_base = OTHER; note = (1,3-dimethylimidazolidin-2-ylidene) Phosphoramidate linkage
  modified_base order(2..26,27..31): mod_base = OTHER; note = Phosphorothioate linkage
  modified_base 26^27: mod_base = OTHER; note = Methylphosphonate linkage
  misc_feature 1..32: note = RM109514

SEQ ID NO: 740 - DNA, 32 bp, synthetic construct; identical to SEQ ID NO: 187
  source 1..32: mol_type = other DNA
  misc_feature 22..23: note = DNA
  misc_feature order(1..21,24..32): note = RNA
  modified_base 21: mod_base = OTHER; note = 2-Prime-O-Methoxyethyl modified 5-methyl Cytidine
  modified_base 22: mod_base = OTHER; note = DNA nucleotide carrying a 6-amino-5-nitro-3-yl-2(1H)-pyridone nucleobase
  modified_base 23: mod_base = OTHER; note = DNA nucleotide carrying a hypoxanthine nucleobase
  modified_base order(8,11,13,20,25,28): mod_base = OTHER; note = 2-Prime-Fluoro modified nucleoside
  modified_base order(1..7,9..10,12,14..19,24,26..27,29..32): mod_base = OTHER; note = 2-Prime-O-Methyl modified nucleoside
  modified_base order(1^2,31^32): mod_base = OTHER; note = (1,3-dimethylimidazolidin-2-ylidene) Phosphoramidate linkage
  modified_base order(2..23,24..31): mod_base = OTHER; note = Phosphorothioate linkage
  modified_base 23^24: mod_base = OTHER; note = Methylphosphonate linkage
  misc_feature 1..32: note = RM109515

SEQ ID NO: 741 - DNA, 32 bp, synthetic construct; identical to SEQ ID NO: 5
  source 1..32: mol_type = other DNA
  misc_feature 19..20: note = DNA
  misc_feature order(1..18,21..32): note = RNA
  modified_base 18: mod_base = OTHER; note = 2-Prime-O-Methoxyethyl modified 5-methyl Cytidine
  modified_base 19: mod_base = OTHER; note = DNA nucleotide carrying a 6-amino-5-nitro-3-yl-2(1H)-pyridone nucleobase
  modified_base 20: mod_base = OTHER; note = DNA nucleotide carrying a hypoxanthine nucleobase
  modified_base order(5,8,10,17,22,25): mod_base = OTHER; note = 2-Prime-Fluoro modified nucleoside
  modified_base order(1..4,6..7,9,11..16,21,23..24,26..32): mod_base = OTHER; note = 2-Prime-O-Methyl modified nucleoside
  modified_base order(1^2,31^32): mod_base = OTHER; note = (1,3-dimethylimidazolidin-2-ylidene) Phosphoramidate linkage
  modified_base order(2..20,21..31): mod_base = OTHER; note = Phosphorothioate linkage
  modified_base 20^21: mod_base = OTHER; note = Methylphosphonate linkage
  misc_feature 1..32: note = RM109516

SEQ ID NO: 742 - DNA, 32 bp, synthetic construct; identical to SEQ ID NO: 189
  source 1..32: mol_type = other DNA
  misc_feature 16..17: note = DNA
  misc_feature order(1..15,18..32): note = RNA
  modified_base 15: mod_base = OTHER; note = 2-Prime-O-Methoxyethyl modified 5-methyl Cytidine
  modified_base 16: mod_base = OTHER; note = DNA nucleotide carrying a 6-amino-5-nitro-3-yl-2(1H)-pyridone nucleobase
  modified_base 17: mod_base = OTHER; note = DNA nucleotide carrying a hypoxanthine nucleobase
  modified_base order(2,5,7,14,19,22): mod_base = OTHER; note = 2-Prime-Fluoro modified nucleoside
  modified_base order(1,3..4,6,8..13,18,20..21,23..32): mod_base = OTHER; note = 2-Prime-O-Methyl modified nucleoside
  modified_base order(1^2,31^32): mod_base = OTHER; note = (1,3-dimethylimidazolidin-2-ylidene) Phosphoramidate linkage
  modified_base order(2..17,18..31): mod_base = OTHER; note = Phosphorothioate linkage
  modified_base 17^18: mod_base = OTHER; note = Methylphosphonate linkage
  misc_feature 1..32: note = RM109517

SEQ ID NO: 743 - DNA, 23 bp, synthetic construct
  source 1..23: mol_type = other DNA
  misc_feature 6..7: note = DNA
  misc_feature order(1..5,8..23): note = RNA
  modified_base 5: mod_base = OTHER; note = 2-Prime-O-Methoxyethyl modified 5-methyl Cytidine
  modified_base 6: mod_base = OTHER; note = DNA nucleotide carrying a 6-amino-5-nitro-3-yl-2(1H)-pyridone nucleobase
  modified_base 7: mod_base = OTHER; note = DNA nucleotide carrying a hypoxanthine nucleobase
  modified_base order(2,9..10,17,19,22): mod_base = OTHER; note = 2-Prime-Fluoro modified nucleoside
  modified_base order(1,3..4,8,11..16,18,20..21,23): mod_base = OTHER; note = 2-Prime-O-Methyl modified nucleoside
  modified_base order(1^2,22^23): mod_base = OTHER; note = (1,3-dimethylimidazolidin-2-ylidene) Phosphoramidate linkage
  modified_base order(2..7,8..22): mod_base = OTHER; note = Phosphorothioate linkage
  modified_base 7^8: mod_base = OTHER; note = Methylphosphonate linkage
  misc_feature 1..23: note = RM109518
catacnntgccaccagggcgatg

SEQ ID NO: 744 - DNA, 32 bp, synthetic construct; identical to SEQ ID NO: 189
  source 1..32: mol_type = other DNA
  misc_feature 16..17: note = DNA
  misc_feature order(1..15,18..32): note = RNA
  modified_base 15: mod_base = OTHER; note = 2-Prime-O-Methoxyethyl modified 5-methyl Cytidine
  modified_base 16: mod_base = OTHER; note = DNA nucleotide carrying a 6-amino-5-nitro-3-yl-2(1H)-pyridone nucleobase
  modified_base 17: mod_base = OTHER; note = DNA nucleotide carrying a hypoxanthine nucleobase
  modified_base order(12,19..20,27,29,32): mod_base = OTHER; note = 2-Prime-Fluoro modified nucleoside
  modified_base order(1..11,13..14,18,21..26,28,30..31): mod_base = OTHER; note = 2-Prime-O-Methyl modified nucleoside
  modified_base order(1^2,31^32): mod_base = OTHER; note = (1,3-dimethylimidazolidin-2-ylidene) Phosphoramidate linkage
  modified_base order(2..17,18..31): mod_base = OTHER; note = Phosphorothioate linkage
  modified_base 17^18: mod_base = OTHER; note = Methylphosphonate linkage
  misc_feature 1..32: note = RM109519

SEQ ID NO: 745 - DNA, 32 bp, synthetic construct; identical to SEQ ID NO: 190
  source 1..32: mol_type = other DNA
  misc_feature 13..14: note = DNA
  misc_feature order(1..12,15..32): note = RNA
  modified_base 12: mod_base = OTHER; note = 2-Prime-O-Methoxyethyl modified 5-methyl Cytidine
  modified_base 13: mod_base = OTHER; note = DNA nucleotide carrying a 6-amino-5-nitro-3-yl-2(1H)-pyridone nucleobase
  modified_base 14: mod_base = OTHER; note = DNA nucleotide carrying a hypoxanthine nucleobase
  modified_base order(9,16..17,24,26,29): mod_base = OTHER; note = 2-Prime-Fluoro modified nucleoside
  modified_base order(1..8,10..11,15,18..23,25,27..28,30..32): mod_base = OTHER; note = 2-Prime-O-Methyl modified nucleoside
  modified_base order(1^2,31^32): mod_base = OTHER; note = (1,3-dimethylimidazolidin-2-ylidene) Phosphoramidate linkage
  modified_base order(2..14,15..31): mod_base = OTHER; note = Phosphorothioate linkage
  modified_base 14^15: mod_base = OTHER; note = Methylphosphonate linkage
  misc_feature 1..32: note = RM109520

SEQ ID NO: 746 - DNA, 32 bp, synthetic construct; identical to SEQ ID NO: 191
  source 1..32: mol_type = other DNA
  misc_feature 10..11: note = DNA
  misc_feature order(1..9,12..32): note = RNA
  modified_base 9: mod_base = OTHER; note = 2-Prime-O-Methoxyethyl modified 5-methyl Cytidine
  modified_base 10: mod_base = OTHER; note = DNA nucleotide carrying a 6-amino-5-nitro-3-yl-2(1H)-pyridone nucleobase
  modified_base 11: mod_base = OTHER; note = DNA nucleotide carrying a hypoxanthine nucleobase
  modified_base order(6,13..14,21,23,26): mod_base = OTHER; note = 2-Prime-Fluoro modified nucleoside
  modified_base order(1..5,7..8,12,15..20,22,24..25,27..32): mod_base = OTHER; note = 2-Prime-O-Methyl modified nucleoside
  modified_base order(1^2,31^32): mod_base = OTHER; note = (1,3-dimethylimidazolidin-2-ylidene) Phosphoramidate linkage
  modified_base order(2..11,12..31): mod_base = OTHER; note = Phosphorothioate linkage
  modified_base 11^12: mod_base = OTHER; note = Methylphosphonate linkage
  misc_feature 1..32: note = RM109521

SEQ ID NO: 747 - DNA, 32 bp, synthetic construct; identical to SEQ ID NO: 192
  source 1..32: mol_type = other DNA
  misc_feature 7..8: note = DNA
  misc_feature order(1..6,9..32): note = RNA
  modified_base 6: mod_base = OTHER; note = 2-Prime-O-Methoxyethyl modified 5-methyl Cytidine
  modified_base 7: mod_base = OTHER; note = DNA nucleotide carrying a 6-amino-5-nitro-3-yl-2(1H)-pyridone nucleobase
  modified_base 8: mod_base = OTHER; note = DNA nucleotide carrying a hypoxanthine nucleobase
  modified_base order(3,10..11,18,20,23): mod_base = OTHER; note = 2-Prime-Fluoro modified nucleoside
  modified_base order(1..2,4..5,9,12..17,19,21..22,24..32): mod_base = OTHER; note = 2-Prime-O-Methyl modified nucleoside
  modified_base order(1^2,31^32): mod_base = OTHER; note = (1,3-dimethylimidazolidin-2-ylidene) Phosphoramidate linkage
  modified_base order(2..8,9..31): mod_base = OTHER; note = Phosphorothioate linkage
  modified_base 8^9: mod_base = OTHER; note = Methylphosphonate linkage
  misc_feature 1..32: note = RM109522

SEQ ID NO: 748 - DNA, 32 bp, synthetic construct; identical to SEQ ID NO: 186
  source 1..32: mol_type = other DNA
  misc_feature 25..26: note = DNA
  misc_feature order(1..24,27..32): note = RNA
  modified_base 24: mod_base = OTHER; note = 2-Prime-O-Methoxyethyl modified 5-methyl Cytidine
  modified_base 25: mod_base = OTHER; note = DNA nucleotide carrying a 6-amino-5-nitro-3-yl-2(1H)-pyridone nucleobase
  modified_base 26: mod_base = OTHER; note = DNA nucleotide carrying a hypoxanthine nucleobase
  modified_base order(23,28,31): mod_base = OTHER; note = 2-Prime-Fluoro modified nucleoside
  modified_base order(1..22,27,29..30,32): mod_base = OTHER; note = 2-Prime-O-Methyl modified nucleoside
  modified_base order(1^2,31^32): mod_base = OTHER; note = (1,3-dimethylimidazolidin-2-ylidene) Phosphoramidate linkage
  modified_base order(2..26,27..31): mod_base = OTHER; note = Phosphorothioate linkage
  modified_base 26^27: mod_base = OTHER; note = Methylphosphonate linkage
  misc_feature 1..32: note = RM109523

SEQ ID NO: 749 - DNA, 32 bp, synthetic construct; identical to SEQ ID NO: 187
  source 1..32: mol_type = other DNA
  misc_feature 22..23: note = DNA
  misc_feature order(1..21,24..32): note = RNA
  modified_base 21: mod_base = OTHER; note = 2-Prime-O-Methoxyethyl modified 5-methyl Cytidine
  modified_base 22: mod_base = OTHER; note = DNA nucleotide carrying a 6-amino-5-nitro-3-yl-2(1H)-pyridone nucleobase
  modified_base 23: mod_base = OTHER; note = DNA nucleotide carrying a hypoxanthine nucleobase
  modified_base order(20,25,28): mod_base = OTHER; note = 2-Prime-Fluoro modified nucleoside
  modified_base order(1..19,24,26..27,29..32): mod_base = OTHER; note = 2-Prime-O-Methyl modified nucleoside
  modified_base order(1^2,31^32): mod_base = OTHER; note = (1,3-dimethylimidazolidin-2-ylidene) Phosphoramidate linkage
  modified_base order(2..23,24..31): mod_base = OTHER; note = Phosphorothioate linkage
  modified_base 23^24: mod_base = OTHER; note = Methylphosphonate linkage
  misc_feature 1..32: note = RM109524

SEQ ID NO: 750 - DNA, 32 bp, synthetic construct; identical to SEQ ID NO: 5
  source 1..32: mol_type = other DNA
  misc_feature 19..20: note = DNA
  misc_feature order(1..18,21..32): note = RNA
  modified_base 18: mod_base = OTHER; note = 2-Prime-O-Methoxyethyl modified 5-methyl Cytidine
  modified_base 19: mod_base = OTHER; note = DNA nucleotide carrying a 6-amino-5-nitro-3-yl-2(1H)-pyridone nucleobase
  modified_base 20: mod_base = OTHER; note = DNA nucleotide carrying a hypoxanthine nucleobase
  modified_base order(17,22,25): mod_base = OTHER; note = 2-Prime-Fluoro modified nucleoside
  modified_base order(1..16,21,23..24,26..32): mod_base = OTHER; note = 2-Prime-O-Methyl modified nucleoside
  modified_base order(1^2,31^32): mod_base = OTHER; note = (1,3-dimethylimidazolidin-2-ylidene) Phosphoramidate linkage
  modified_base order(2..20,21..31): mod_base = OTHER; note = Phosphorothioate linkage
  modified_base 20^21: mod_base = OTHER; note = Methylphosphonate linkage
  misc_feature 1..32: note = RM109525

SEQ ID NO: 751 - DNA, 32 bp, synthetic construct; identical to SEQ ID NO: 189
  source 1..32: mol_type = other DNA
  misc_feature 16..17: note = DNA
  misc_feature order(1..15,18..32): note = RNA
  modified_base 15: mod_base = OTHER; note = 2-Prime-O-Methoxyethyl modified 5-methyl Cytidine
  modified_base 16: mod_base = OTHER; note = DNA nucleotide carrying a 6-amino-5-nitro-3-yl-2(1H)-pyridone nucleobase
  modified_base 17: mod_base = OTHER; note = DNA nucleotide carrying a hypoxanthine nucleobase
  modified_base order(14,19,22): mod_base = OTHER; note = 2-Prime-Fluoro modified nucleoside
  modified_base order(1..13,18,20..21,23..32): mod_base = OTHER; note = 2-Prime-O-Methyl modified nucleoside
  modified_base order(1^2,31^32): mod_base = OTHER; note = (1,3-dimethylimidazolidin-2-ylidene) Phosphoramidate linkage
  modified_base order(2..17,18..31): mod_base = OTHER; note = Phosphorothioate linkage
  modified_base 17^18: mod_base = OTHER; note = Methylphosphonate linkage
  misc_feature 1..32: note = RM109526

SEQ ID NO: 752 - DNA, 32 bp, synthetic construct; identical to SEQ ID NO: 190
  source 1..32: mol_type = other DNA
  misc_feature 13..14: note = DNA
  misc_feature order(1..12,15..32): note = RNA
  modified_base 12: mod_base = OTHER; note = 2-Prime-O-Methoxyethyl modified 5-methyl Cytidine
  modified_base 13: mod_base = OTHER; note = DNA nucleotide carrying a 6-amino-5-nitro-3-yl-2(1H)-pyridone nucleobase
  modified_base 14: mod_base = OTHER; note = DNA nucleotide carrying a hypoxanthine nucleobase
  modified_base order(11,16,19): mod_base = OTHER; note = 2-Prime-Fluoro modified nucleoside
  modified_base order(1..10,15,17..18,20..32): mod_base = OTHER; note = 2-Prime-O-Methyl modified nucleoside
  modified_base order(1^2,31^32): mod_base = OTHER; note = (1,3-dimethylimidazolidin-2-ylidene) Phosphoramidate linkage
  modified_base order(2..14,15..31): mod_base = OTHER; note = Phosphorothioate linkage
  modified_base 14^15: mod_base = OTHER; note = Methylphosphonate linkage
  misc_feature 1..32: note = RM109527

SEQ ID NO: 753 - DNA, 32 bp, synthetic construct; identical to SEQ ID NO: 191
  source 1..32: mol_type = other DNA
  misc_feature 10..11: note = DNA
  misc_feature order(1..9,12..32): note = RNA
  modified_base 9: mod_base = OTHER; note = 2-Prime-O-Methoxyethyl modified 5-methyl Cytidine
  modified_base 10: mod_base = OTHER; note = DNA nucleotide carrying a 6-amino-5-nitro-3-yl-2(1H)-pyridone nucleobase
  modified_base 11: mod_base = OTHER; note = DNA nucleotide carrying a hypoxanthine nucleobase
  modified_base order(8,13,16): mod_base = OTHER; note = 2-Prime-Fluoro modified nucleoside
  modified_base order(1..7,12,14..15,17..32): mod_base = OTHER; note = 2-Prime-O-Methyl modified nucleoside
  modified_base order(1^2,31^32): mod_base = OTHER; note = (1,3-dimethylimidazolidin-2-ylidene) Phosphoramidate linkage
  modified_base order(2..11,12..31): mod_base = OTHER; note = Phosphorothioate linkage
  modified_base 11^12: mod_base = OTHER; note = Methylphosphonate linkage
  misc_feature 1..32: note = RM109528

SEQ ID NO: 754 - DNA, 32 bp, synthetic construct; identical to SEQ ID NO: 192
  source 1..32: mol_type = other DNA
  misc_feature 7..8: note = DNA
  misc_feature order(1..6,9..32): note = RNA
  modified_base 6: mod_base = OTHER; note = 2-Prime-O-Methoxyethyl modified 5-methyl Cytidine
  modified_base 7: mod_base = OTHER; note = DNA nucleotide carrying a 6-amino-5-nitro-3-yl-2(1H)-pyridone nucleobase
  modified_base 8: mod_base = OTHER; note = DNA nucleotide carrying a hypoxanthine nucleobase
  modified_base order(5,10,13): mod_base = OTHER; note = 2-Prime-Fluoro modified nucleoside
  modified_base order(1..4,9,11..12,14..32): mod_base = OTHER; note = 2-Prime-O-Methyl modified nucleoside
  modified_base order(1^2,31^32): mod_base = OTHER; note = (1,3-dimethylimidazolidin-2-ylidene) Phosphoramidate linkage
  modified_base order(2..8,9..31): mod_base = OTHER; note = Phosphorothioate linkage
  modified_base 8^9: mod_base = OTHER; note = Methylphosphonate linkage
  misc_feature 1..32: note = RM109529

SEQ ID NO: 755 - DNA, 32 bp, synthetic construct; identical to SEQ ID NO: 185
  source 1..32: mol_type = other DNA
  misc_feature 28..29: note = DNA
  misc_feature order(1..27,30..32): note = RNA
  modified_base 27: mod_base = OTHER; note = 2-Prime-O-Methoxyethyl modified 5-methyl Cytidine
  modified_base 28: mod_base = OTHER; note = DNA nucleotide carrying a 6-amino-5-nitro-3-yl-2(1H)-pyridone nucleobase
  modified_base 29: mod_base = OTHER; note = DNA nucleotide carrying a hypoxanthine nucleobase
  modified_base order(24,31..32): mod_base = OTHER; note = 2-Prime-Fluoro modified nucleoside
  modified_base order(1..23,25..26,30): mod_base = OTHER; note = 2-Prime-O-Methyl modified nucleoside
  modified_base order(1^2,31^32): mod_base = OTHER; note = (1,3-dimethylimidazolidin-2-ylidene) Phosphoramidate linkage
  modified_base order(2..29,30^31): mod_base = OTHER; note = Phosphorothioate linkage
  modified_base 29^30: mod_base = OTHER; note = Methylphosphonate linkage
  misc_feature 1..32: note = RM109530

SEQ ID NO: 756 - DNA, 32 bp, synthetic construct; identical to SEQ ID NO: 186
  source 1..32: mol_type = other DNA
  misc_feature 25..26: note = DNA
  misc_feature order(1..24,27..32): note = RNA
  modified_base 24: mod_base = OTHER; note = 2-Prime-O-Methoxyethyl modified 5-methyl Cytidine
  modified_base 25: mod_base = OTHER; note = DNA nucleotide carrying a 6-amino-5-nitro-3-yl-2(1H)-pyridone nucleobase
  modified_base 26: mod_base = OTHER; note = DNA nucleotide carrying a hypoxanthine nucleobase
  modified_base order(21,28..29): mod_base = OTHER; note = 2-Prime-Fluoro modified nucleoside
  modified_base order(1..20,22..23,27,30..32): mod_base = OTHER; note = 2-Prime-O-Methyl modified nucleoside
  modified_base order(1^2,31^32): mod_base = OTHER; note = (1,3-dimethylimidazolidin-2-ylidene) Phosphoramidate linkage
  modified_base order(2..26,27..31): mod_base = OTHER; note = Phosphorothioate linkage
  modified_base 26^27: mod_base = OTHER; note = Methylphosphonate linkage
  misc_feature 1..32: note = RM109531

SEQ ID NO: 757 - DNA, 32 bp, synthetic construct; identical to SEQ ID NO: 187
  source 1..32: mol_type = other DNA
  misc_feature 22..23: note = DNA
  misc_feature order(1..21,24..32): note = RNA
  modified_base 21: mod_base = OTHER; note = 2-Prime-O-Methoxyethyl modified 5-methyl Cytidine
  modified_base 22: mod_base = OTHER; note = DNA nucleotide carrying a 6-amino-5-nitro-3-yl-2(1H)-pyridone nucleobase
  modified_base 23: mod_base = OTHER; note = DNA nucleotide carrying a hypoxanthine nucleobase
  modified_base order(18,25..26): mod_base = OTHER; note = 2-Prime-Fluoro modified nucleoside
  modified_base order(1..17,19..20,24,27..32): mod_base = OTHER; note = 2-Prime-O-Methyl modified nucleoside
  modified_base order(1^2,31^32): mod_base = OTHER; note = (1,3-dimethylimidazolidin-2-ylidene) Phosphoramidate linkage
  modified_base order(2..23,24..31): mod_base = OTHER; note = Phosphorothioate linkage
  modified_base 23^24: mod_base = OTHER; note = Methylphosphonate linkage
  misc_feature 1..32: note = RM109532

SEQ ID NO: 758 - DNA, 32 bp, synthetic construct; identical to SEQ ID NO: 5
  source 1..32: mol_type = other DNA
  misc_feature 19..20: note = DNA
  misc_feature order(1..18,21..32): note = RNA
  modified_base 18: mod_base = OTHER; note = 2-Prime-O-Methoxyethyl modified 5-methyl Cytidine
  modified_base 19: mod_base = OTHER; note = DNA nucleotide carrying a 6-amino-5-nitro-3-yl-2(1H)-pyridone nucleobase
  modified_base 20: mod_base = OTHER; note = DNA nucleotide carrying a hypoxanthine nucleobase
  modified_base order(15,22..23): mod_base = OTHER; note = 2-Prime-Fluoro modified nucleoside
  modified_base order(1..14,16..17,21,24..32): mod_base = OTHER; note = 2-Prime-O-Methyl modified nucleoside
  modified_base order(1^2,31^32): mod_base = OTHER; note = (1,3-dimethylimidazolidin-2-ylidene) Phosphoramidate linkage
  modified_base order(2..20,21..31): mod_base = OTHER; note = Phosphorothioate linkage
  modified_base 20^21: mod_base = OTHER; note = Methylphosphonate linkage
  misc_feature 1..32: note = RM109533

SEQ ID NO: 759 - DNA, 32 bp, synthetic construct; identical to SEQ ID NO: 189
  source 1..32: mol_type = other DNA
  misc_feature 16..17: note = DNA
  misc_feature order(1..15,18..32): note = RNA
  modified_base 15: mod_base = OTHER; note = 2-Prime-O-Methoxyethyl modified 5-methyl Cytidine
  modified_base 16: mod_base = OTHER; note = DNA nucleotide carrying a 6-amino-5-nitro-3-yl-2(1H)-pyridone nucleobase
  modified_base 17: mod_base = OTHER; note = DNA nucleotide carrying a hypoxanthine nucleobase
  modified_base order(12,19..20): mod_base = OTHER; note = 2-Prime-Fluoro modified nucleoside
  modified_base order(1..11,13..14,18,21..32): mod_base = OTHER; note = 2-Prime-O-Methyl modified nucleoside
  modified_base order(1^2,31^32): mod_base = OTHER; note = (1,3-dimethylimidazolidin-2-ylidene) Phosphoramidate linkage
  modified_base order(2..17,18..31): mod_base = OTHER; note = Phosphorothioate linkage
  modified_base 17^18: mod_base = OTHER; note = Methylphosphonate linkage
  misc_feature 1..32: note = RM109534

SEQ ID NO: 760 - DNA, 32 bp, synthetic construct; identical to SEQ ID NO: 190
  source 1..32: mol_type = other DNA
  misc_feature 13..14: note = DNA
  misc_feature order(1..12,15..32): note = RNA
  modified_base 12: mod_base = OTHER; note = 2-Prime-O-Methoxyethyl modified 5-methyl Cytidine
  modified_base 13: mod_base = OTHER; note = DNA nucleotide carrying a 6-amino-5-nitro-3-yl-2(1H)-pyridone nucleobase
  modified_base 14: mod_base = OTHER; note = DNA nucleotide carrying a hypoxanthine nucleobase
  modified_base order(9,16..17): mod_base = OTHER; note = 2-Prime-Fluoro modified nucleoside
  modified_base order(1..8,10..11,15,18..32): mod_base = OTHER; note = 2-Prime-O-Methyl modified nucleoside
  modified_base order(1^2,31^32): mod_base = OTHER; note = (1,3-dimethylimidazolidin-2-ylidene) Phosphoramidate linkage
  modified_base order(2..14,15..31): mod_base = OTHER; note = Phosphorothioate linkage
  modified_base 14^15: mod_base = OTHER; note = Methylphosphonate linkage
  misc_feature 1..32: note = RM109535

SEQ ID NO: 761 - DNA, 32 bp, synthetic construct; identical to SEQ ID NO: 191
  source 1..32: mol_type = other DNA
  misc_feature 10..11: note = DNA
  misc_feature order(1..9,12..32): note = RNA
  modified_base 9: mod_base = OTHER; note = 2-Prime-O-Methoxyethyl modified 5-methyl Cytidine
  modified_base 10: mod_base = OTHER; note = DNA nucleotide carrying a 6-amino-5-nitro-3-yl-2(1H)-pyridone nucleobase
  modified_base 11: mod_base = OTHER; note = DNA nucleotide carrying a hypoxanthine nucleobase
  modified_base order(6,13..14): mod_base = OTHER; note = 2-Prime-Fluoro modified nucleoside
  modified_base order(1..5,7..8,12,15..32): mod_base = OTHER; note = 2-Prime-O-Methyl modified nucleoside
  modified_base order(1^2,31^32): mod_base = OTHER; note = (1,3-dimethylimidazolidin-2-ylidene) Phosphoramidate linkage
  modified_base order(2..11,12..31): mod_base = OTHER; note = Phosphorothioate linkage
  modified_base 11^12: mod_base = OTHER; note = Methylphosphonate linkage
  misc_feature 1..32: note = RM109536

SEQ ID NO: 762 - DNA, 32 bp, synthetic construct; identical to SEQ ID NO: 192
  source 1..32: mol_type = other DNA
  misc_feature 7..8: note = DNA
  misc_feature order(1..6,9..32): note = RNA
  modified_base 6: mod_base = OTHER; note = 2-Prime-O-Methoxyethyl modified 5-methyl Cytidine
  modified_base 7: mod_base = OTHER; note = DNA nucleotide carrying a 6-amino-5-nitro-3-yl-2(1H)-pyridone nucleobase
  modified_base 8: mod_base = OTHER; note = DNA nucleotide carrying a hypoxanthine nucleobase
  modified_base order(3,10..11): mod_base = OTHER; note = 2-Prime-Fluoro modified nucleoside
  modified_base order(1..2,4..5,9,12..32): mod_base = OTHER; note = 2-Prime-O-Methyl modified nucleoside
  modified_base order(1^2,31^32): mod_base = OTHER; note = (1,3-dimethylimidazolidin-2-ylidene) Phosphoramidate linkage
  modified_base order(2..8,9..31): mod_base = OTHER; note = Phosphorothioate linkage
  modified_base 8^9: mod_base = OTHER; note = Methylphosphonate linkage
  misc_feature 1..32: note = RM109537

SEQ ID NO: 763 - DNA, 26 bp, synthetic construct
  source 1..26: mol_type = other DNA
  misc_feature 7..8: note = DNA
  misc_feature order(1..6,9..26): note = RNA
  modified_base 6: mod_base = OTHER; note = 2-Prime-O-Methoxyethyl modified 5-methyl Cytidine
  modified_base 7: mod_base = OTHER; note = DNA nucleotide carrying a 6-amino-5-nitro-3-yl-2(1H)-pyridone nucleobase
  modified_base 8: mod_base = OTHER; note = DNA nucleotide carrying a hypoxanthine nucleobase
  modified_base order(3,10,12,18,20,23..24): mod_base = OTHER; note = 2-Prime-Fluoro modified nucleoside
  modified_base order(1..2,4..5,9,11,13..17,19,21..22,25..26): mod_base = OTHER; note = 2-Prime-O-Methyl modified nucleoside
  modified_base order(1^2,25^26): mod_base = OTHER; note = (1,3-dimethylimidazolidin-2-ylidene) Phosphoramidate linkage
  modified_base order(2..8,9..25): mod_base = OTHER; note = Phosphorothioate linkage
  modified_base 8^9: mod_base = OTHER; note = Methylphosphonate linkage
  misc_feature 1..26: note = RM109538
ccatacnntgccaccagggcgatggc

SEQ ID NO: 764 - DNA, 26 bp, synthetic construct
  source 1..26: mol_type = other DNA
  misc_feature 19..20: note = DNA
  misc_feature order(1..18,21..26): note = RNA
  modified_base 18: mod_base = OTHER; note = 2-Prime-O-Methoxyethyl modified 5-methyl Cytidine
  modified_base 19: mod_base = OTHER; note = DNA nucleotide carrying a 6-amino-5-nitro-3-yl-2(1H)-pyridone nucleobase
  modified_base 20: mod_base = OTHER; note = DNA nucleotide carrying a hypoxanthine nucleobase
  modified_base order(4..5,8,10,16,22,25): mod_base = OTHER; note = 2-Prime-Fluoro modified nucleoside
  modified_base order(1..3,6..7,9,11..15,17,21,23..24,26): mod_base = OTHER; note = 2-Prime-O-Methyl modified nucleoside
  modified_base order(1^2,25^26): mod_base = OTHER; note = (1,3-dimethylimidazolidin-2-ylidene) Phosphoramidate linkage
  modified_base order(2..20,21..25): mod_base = OTHER; note = Phosphorothioate linkage
  modified_base 20^21: mod_base = OTHER; note = Methylphosphonate linkage
  misc_feature 1..26: note = RM109539
aggggcatgatgccatacnntgccac

SEQ ID NO: 765 - DNA, 26 bp, synthetic construct
  source 1..26: mol_type = other DNA
  misc_feature 16..17: note = DNA
  misc_feature order(1..15,18..26): note = RNA
  modified_base 15: mod_base = OTHER; note = 2-Prime-O-Methoxyethyl modified 5-methyl Cytidine
  modified_base 16: mod_base = OTHER; note = DNA nucleotide carrying a 6-amino-5-nitro-3-yl-2(1H)-pyridone nucleobase
  modified_base 17: mod_base = OTHER; note = DNA nucleotide carrying a hypoxanthine nucleobase
  modified_base order(1..2,5,7,13,19,22): mod_base = OTHER; note = 2-Prime-Fluoro modified nucleoside
  modified_base order(3..4,6,8..12,14,18,20..21,23..26): mod_base = OTHER; note = 2-Prime-O-Methyl modified nucleoside
  modified_base order(1^2,25^26): mod_base = OTHER; note = (1,3-dimethylimidazolidin-2-ylidene) Phosphoramidate linkage
  modified_base order(2..17,18..25): mod_base = OTHER; note = Phosphorothioate linkage
  modified_base 17^18: mod_base = OTHER; note = Methylphosphonate linkage
  misc_feature 1..26: note = RM109540
ggcatgatgccatacnntgccaccag

SEQ ID NO: 766 - DNA, 26 bp, synthetic construct
  source 1..26: mol_type = other DNA
  misc_feature 13..14: note = DNA
  misc_feature order(1..12,15..26): note = RNA
  modified_base 12: mod_base = OTHER; note = 2-Prime-O-Methoxyethyl modified 5-methyl Cytidine
  modified_base 13: mod_base = OTHER; note = DNA nucleotide carrying a 6-amino-5-nitro-3-yl-2(1H)-pyridone nucleobase
  modified_base 14: mod_base = OTHER; note = DNA nucleotide carrying a hypoxanthine nucleobase
  modified_base order(9,16,18,24,26): mod_base = OTHER; note = 2-Prime-Fluoro modified nucleoside
  modified_base order(1..8,10..11,15,17,19..23,25): mod_base = OTHER; note = 2-Prime-O-Methyl modified nucleoside
  modified_base order(1^2,25^26): mod_base = OTHER; note = (1,3-dimethylimidazolidin-2-ylidene) Phosphoramidate linkage
  modified_base order(2..14,15..25): mod_base = OTHER; note = Phosphorothioate linkage
  modified_base 14^15: mod_base = OTHER; note = Methylphosphonate linkage
  misc_feature 1..26: note = RM109541
atgatgccatacnntgccaccagggc

SEQ ID NO: 767 - DNA, 26 bp, synthetic construct
  source 1..26: mol_type = other DNA
  misc_feature 10..11: note = DNA
  misc_feature order(1..9,12..26): note = RNA
  modified_base 9: mod_base = OTHER; note = 2-Prime-O-Methoxyethyl modified 5-methyl Cytidine
  modified_base 10: mod_base = OTHER; note = DNA nucleotide carrying a 6-amino-5-nitro-3-yl-2(1H)-pyridone nucleobase
  modified_base 11: mod_base = OTHER; note = DNA nucleotide carrying a hypoxanthine nucleobase
  modified_base order(6,13,15,21,23): mod_base = OTHER; note = 2-Prime-Fluoro modified nucleoside
  modified_base order(1..5,7..8,12,14,16..20,22,24..26): mod_base = OTHER; note = 2-Prime-O-Methyl modified nucleoside
  modified_base order(1^2,25^26): mod_base = OTHER; note = (1,3-dimethylimidazolidin-2-ylidene) Phosphoramidate linkage
  modified_base order(2..11,12..25): mod_base = OTHER; note = Phosphorothioate linkage
  modified_base 11^12: mod_base = OTHER; note = Methylphosphonate linkage
  misc_feature 1..26: note = RM109542
atgccatacnntgccaccagggcgat

SEQ ID NO: 768 - DNA, 26 bp, synthetic construct
  source 1..26: mol_type = other DNA
  misc_feature 7..8: note = DNA
  misc_feature order(1..6,9..26): note = RNA
  modified_base 6: mod_base = OTHER; note = 2-Prime-O-Methoxyethyl modified 5-methyl Cytidine
  modified_base 7: mod_base = OTHER; note = DNA nucleotide carrying a 6-amino-5-nitro-3-yl-2(1H)-pyridone nucleobase
  modified_base 8: mod_base = OTHER; note = DNA nucleotide carrying a hypoxanthine nucleobase
  modified_base order(3,10,12,18,20): mod_base = OTHER; note = 2-Prime-Fluoro modified nucleoside
  modified_base order(1..2,4..5,9,11,13..17,19,21..26): mod_base = OTHER; note = 2-Prime-O-Methyl modified nucleoside
  modified_base order(1^2,25^26): mod_base = OTHER; note = (1,3-dimethylimidazolidin-2-ylidene) Phosphoramidate linkage
  modified_base order(2..8,9..25): mod_base = OTHER; note = Phosphorothioate linkage
  modified_base 8^9: mod_base = OTHER; note = Methylphosphonate linkage
  misc_feature 1..26: note = RM109543
ccatacnntgccaccagggcgatggc

SEQ ID NO: 769 - DNA, 29 bp, synthetic construct
  source 1..29: mol_type = other DNA
  misc_feature 15..16: note = DNA
  misc_feature order(1..14,17..29): note = RNA
  modified_base 14: mod_base = OTHER; note = 2-Prime-O-Methoxyethyl modified 5-methyl Cytidine
  modified_base 15: mod_base = OTHER; note = DNA nucleotide carrying a 6-amino-5-nitro-3-yl-2(1H)-pyridone nucleobase
  modified_base 16: mod_base = OTHER; note = DNA nucleotide carrying a hypoxanthine nucleobase
  modified_base order(11,18,20,26,28): mod_base = OTHER; note = 2-Prime-Fluoro modified nucleoside
  modified_base order(1..10,12..13,17,19,21..25,27,29): mod_base = OTHER; note = 2-Prime-O-Methyl modified nucleoside
  modified_base order(1^2,28^29): mod_base = OTHER; note = (1,3-dimethylimidazolidin-2-ylidene) Phosphoramidate linkage
  modified_base order(2..16,17..28): mod_base = OTHER; note = Phosphorothioate linkage
  modified_base 16^17: mod_base = OTHER; note = Methylphosphonate linkage
  misc_feature 1..29: note = RM109544
gcatgatgccatacnntgccaccagggcg

SEQ ID NO: 770 - DNA, 29 bp, synthetic construct
  source 1..29: mol_type = other DNA
  misc_feature 12..13: note = DNA
  misc_feature order(1..11,14..29): note = RNA
  modified_base 11: mod_base = OTHER; note = 2-Prime-O-Methoxyethyl modified 5-methyl Cytidine
  modified_base 12: mod_base = OTHER; note = DNA nucleotide carrying a 6-amino-5-nitro-3-yl-2(1H)-pyridone nucleobase
  modified_base 13: mod_base = OTHER; note = DNA nucleotide carrying a hypoxanthine nucleobase
  modified_base order(8,15,17,23,25): mod_base = OTHER; note = 2-Prime-Fluoro modified nucleoside
  modified_base order(1..7,9..10,14,16,18..22,24,26..29): mod_base = OTHER; note = 2-Prime-O-Methyl modified nucleoside
  modified_base order(1^2,28^29): mod_base = OTHER; note = (1,3-dimethylimidazolidin-2-ylidene) Phosphoramidate linkage
  modified_base order(2..13,14..28): mod_base = OTHER; note = Phosphorothioate linkage
  modified_base 13^14: mod_base = OTHER; note = Methylphosphonate linkage
  misc_feature 1..29: note = RM109545
tgatgccatacnntgccaccagggcgatg

SEQ ID NO: 771 - DNA, 29 bp, synthetic construct
  source 1..29: mol_type = other DNA
  misc_feature 9..10: note = DNA
  misc_feature order(1..8,11..29): note = RNA
  modified_base 8: mod_base = OTHER; note = 2-Prime-O-Methoxyethyl modified 5-methyl Cytidine
  modified_base 9: mod_base = OTHER; note = DNA nucleotide carrying a 6-amino-5-nitro-3-yl-2(1H)-pyridone nucleobase
  modified_base 10: mod_base = OTHER; note = DNA nucleotide carrying a hypoxanthine nucleobase
  modified_base order(5,12,14,20,22): mod_base = OTHER; note = 2-Prime-Fluoro modified nucleoside
  modified_base order(1..4,6..7,11,13,15..19,21,23..29): mod_base = OTHER; note = 2-Prime-O-Methyl modified nucleoside
  modified_base order(1^2,28^29): mod_base = OTHER; note = (1,3-dimethylimidazolidin-2-ylidene) Phosphoramidate linkage
  modified_base order(2..10,11..28): mod_base = OTHER; note = Phosphorothioate linkage
  modified_base 10^11: mod_base = OTHER; note = Methylphosphonate linkage
  misc_feature 1..29: note = RM109546
tgccatacnntgccaccagggcgatggcc

SEQ ID NO: 772 - DNA, 29 bp, synthetic construct
  source 1..29: mol_type = other DNA
  misc_feature 6..7: note = DNA
  misc_feature order(1..5,8..29): note = RNA
  modified_base 5: mod_base = OTHER; note = 2-Prime-O-Methoxyethyl modified 5-methyl Cytidine
  modified_base 6: mod_base = OTHER; note = DNA nucleotide carrying a 6-amino-5-nitro-3-yl-2(1H)-pyridone nucleobase
  modified_base 7: mod_base = OTHER; note = DNA nucleotide carrying a hypoxanthine nucleobase
  modified_base order(2,9,11,17,19): mod_base = OTHER; note = 2-Prime-Fluoro modified nucleoside
  modified_base order(1,3..4,8,10,12..16,18,20..29): mod_base = OTHER; note = 2-Prime-O-Methyl modified nucleoside
  modified_base order(1^2,28^29): mod_base = OTHER; note = (1,3-dimethylimidazolidin-2-ylidene) Phosphoramidate linkage
  modified_base order(2..7,8..28): mod_base = OTHER; note = Phosphorothioate linkage
  modified_base 7^8: mod_base = OTHER; note = Methylphosphonate linkage
  misc_feature 1..29: note = RM109547
catacnntgccaccagggcgatggccagc

SEQ ID NO: 773 - DNA, 26 bp, synthetic construct
  source 1..26: mol_type = other DNA
  misc_feature 19..20: note = DNA
  misc_feature order(1..18,21..26): note = RNA
  modified_base 18: mod_base = OTHER; note = 2-Prime-O-Methoxyethyl modified 5-methyl Cytidine
  modified_base 19: mod_base = OTHER; note = DNA nucleotide carrying a 6-amino-5-nitro-3-yl-2(1H)-pyridone nucleobase
  modified_base 20: mod_base = OTHER; note = DNA nucleotide carrying a hypoxanthine nucleobase
  modified_base order(8,10,16,22,25): mod_base = OTHER; note = 2-Prime-Fluoro modified nucleoside
  modified_base order(1..7,9,11..15,17,21,23..24,26): mod_base = OTHER; note = 2-Prime-O-Methyl modified nucleoside
  modified_base order(1^2,25^26): mod_base = OTHER; note = (1,3-dimethylimidazolidin-2-ylidene) Phosphoramidate linkage
  modified_base order(2..20,21..25): mod_base = OTHER; note = Phosphorothioate linkage
  modified_base 20^21: mod_base = OTHER; note = Methylphosphonate linkage
  misc_feature 1..26: note = RM109548
aggggcatgatgccatacnntgccac

SEQ ID NO: 774 - DNA, 26 bp, synthetic construct
  source 1..26: mol_type = other DNA
  misc_feature 16..17: note = DNA
  misc_feature order(1..15,18..26): note = RNA
  modified_base 15: mod_base = OTHER; note = 2-Prime-O-Methoxyethyl modified 5-methyl Cytidine
  modified_base 16: mod_base = OTHER; note = DNA nucleotide carrying a 6-amino-5-nitro-3-yl-2(1H)-pyridone nucleobase
  modified_base 17: mod_base = OTHER; note = DNA nucleotide carrying a hypoxanthine nucleobase
  modified_base order(5,7,13,19,22): mod_base = OTHER; note = 2-Prime-Fluoro modified nucleoside
  modified_base order(1..4,6,8..12,14,18,20..21,23..26): mod_base = OTHER; note = 2-Prime-O-Methyl modified nucleoside
  modified_base order(1^2,25^26): mod_base = OTHER; note = (1,3-dimethylimidazolidin-2-ylidene) Phosphoramidate linkage
  modified_base order(2..17,18..25): mod_base = OTHER; note = Phosphorothioate linkage
  modified_base 17^18: mod_base = OTHER; note = Methylphosphonate linkage
  misc_feature 1..26: note = RM109549
ggcatgatgccatacnntgccaccag

SEQ ID NO: 775 - DNA, 26 bp, synthetic construct
  source 1..26: mol_type = other DNA
  misc_feature 13..14: note = DNA
  misc_feature order(1..12,15..26): note = RNA
  modified_base 12: mod_base = OTHER; note = 2-Prime-O-Methoxyethyl modified 5-methyl Cytidine
  modified_base 13: mod_base = OTHER; note = DNA nucleotide carrying a 6-amino-5-nitro-3-yl-2(1H)-pyridone nucleobase
  modified_base 14: mod_base = OTHER; note = DNA nucleotide carrying a hypoxanthine nucleobase
  modified_base order(2,4,10,16,19): mod_base = OTHER; note = 2-Prime-Fluoro modified nucleoside
  modified_base order(1,3,5..9,11,15,17..18,20..26): mod_base = OTHER; note = 2-Prime-O-Methyl modified nucleoside
  modified_base order(1^2,25^26): mod_base = OTHER; note = (1,3-dimethylimidazolidin-2-ylidene) Phosphoramidate linkage
  modified_base order(2..14,15..25): mod_base = OTHER; note = Phosphorothioate linkage
  modified_base 14^15: mod_base = OTHER; note = Methylphosphonate linkage
  misc_feature 1..26: note = RM109550
atgatgccatacnntgccaccagggc

SEQ ID NO: 776 - DNA, 29 bp, synthetic construct
  source 1..29: mol_type = other DNA
  misc_feature 21..22: note = DNA
  misc_feature order(1..20,23..29): note = RNA
  modified_base 20: mod_base = OTHER; note = 2-Prime-O-Methoxyethyl modified 5-methyl Cytidine
  modified_base 21: mod_base = OTHER; note = DNA nucleotide carrying a 6-amino-5-nitro-3-yl-2(1H)-pyridone nucleobase
  modified_base 22: mod_base = OTHER; note = DNA nucleotide carrying a hypoxanthine nucleobase
  modified_base order(10,12,18,24,27): mod_base = OTHER; note = 2-Prime-Fluoro modified nucleoside
  modified_base order(1..9,11,13..17,19,23,25..26,28..29): mod_base = OTHER; note = 2-Prime-O-Methyl modified nucleoside
  modified_base order(1^2,28^29): mod_base = OTHER; note = (1,3-dimethylimidazolidin-2-ylidene) Phosphoramidate linkage
  modified_base order(2..22,23..28): mod_base = OTHER; note = Phosphorothioate linkage
  modified_base 22^23: mod_base = OTHER; note = Methylphosphonate linkage
  misc_feature 1..29: note = RM109551
tgaggggcatgatgccatacnntgccacc

SEQ ID NO: 777 - DNA, 29 bp, synthetic construct
  source 1..29: mol_type = other DNA
  misc_feature 18..19: note = DNA
  misc_feature order(1..17,20..29): note = RNA
  modified_base 17: mod_base = OTHER; note = 2-Prime-O-Methoxyethyl modified 5-methyl Cytidine
  modified_base 18: mod_base = OTHER; note = DNA nucleotide carrying a 6-amino-5-nitro-3-yl-2(1H)-pyridone nucleobase
  modified_base 19: mod_base = OTHER; note = DNA nucleotide carrying a hypoxanthine nucleobase
  modified_base order(7,9,15,21,24): mod_base = OTHER; note = 2-Prime-Fluoro modified nucleoside
  modified_base order(1..6,8,10..14,16,20,22..23,25..29): mod_base = OTHER; note = 2-Prime-O-Methyl modified nucleoside
  modified_base order(1^2,28^29): mod_base = OTHER; note = (1,3-dimethylimidazolidin-2-ylidene) Phosphoramidate linkage
  modified_base order(2..19,20..28): mod_base = OTHER; note = Phosphorothioate linkage
  modified_base 19^20: mod_base = OTHER; note = Methylphosphonate linkage
  misc_feature 1..29: note = RM109552
ggggcatgatgccatacnntgccaccagg

SEQ ID NO: 778 - DNA, 29 bp, synthetic construct
  source 1..29: mol_type = other DNA
  misc_feature 15..16: note = DNA
  misc_feature order(1..14,17..29): note = RNA
  modified_base 14: mod_base = OTHER; note = 2-Prime-O-Methoxyethyl modified 5-methyl Cytidine
  modified_base 15: mod_base = OTHER; note = DNA nucleotide carrying a 6-amino-5-nitro-3-yl-2(1H)-pyridone nucleobase
  modified_base 16: mod_base = OTHER; note = DNA nucleotide carrying a hypoxanthine nucleobase
  modified_base order(4,6,12,18,21): mod_base = OTHER; note = 2-Prime-Fluoro modified nucleoside
  modified_base order(1..3,5,7..11,13,17,19..20,22..29): mod_base = OTHER; note = 2-Prime-O-Methyl modified nucleoside
  modified_base order(1^2,28^29): mod_base = OTHER; note = (1,3-dimethylimidazolidin-2-ylidene) Phosphoramidate linkage
  modified_base order(2..16,17..28): mod_base = OTHER; note = Phosphorothioate linkage
  modified_base 16^17: mod_base = OTHER; note = Methylphosphonate linkage
  misc_feature 1..29: note = RM109553
gcatgatgccatacnntgccaccagggcg

SEQ ID NO: 779 - DNA, 29 bp, synthetic construct
  source 1..29: mol_type = other DNA
  misc_feature 12..13: note = DNA
  misc_feature order(1..11,14..29): note = RNA
  modified_base 11: mod_base = OTHER; note = 2-Prime-O-Methoxyethyl modified 5-methyl Cytidine
  modified_base 12: mod_base = OTHER; note = DNA nucleotide carrying a 6-amino-5-nitro-3-yl-2(1H)-pyridone nucleobase
  modified_base 13: mod_base = OTHER; note = DNA nucleotide carrying a hypoxanthine nucleobase
  modified_base order(1,3,9,15,18): mod_base = OTHER; note = 2-Prime-Fluoro modified nucleoside
  modified_base order(2,4..8,10,14,16..17,19..29): mod_base = OTHER; note = 2-Prime-O-Methyl modified nucleoside
  modified_base order(1^2,28^29): mod_base = OTHER; note = (1,3-dimethylimidazolidin-2-ylidene) Phosphoramidate linkage
  modified_base order(2..13,14..28): mod_base = OTHER; note = Phosphorothioate linkage
  modified_base 13^14: mod_base = OTHER; note = Methylphosphonate linkage
  misc_feature 1..29: note = RM109554
tgatgccatacnntgccaccagggcgatg

SEQ ID NO: 780 - DNA, 26 bp, synthetic construct
  source 1..26: mol_type = other DNA
  misc_feature 16..17: note = DNA
  misc_feature order(1..15,18..26): note = RNA
  modified_base 15: mod_base = OTHER; note = 2-Prime-O-Methoxyethyl modified 5-methyl Cytidine
  modified_base 16: mod_base = OTHER; note = DNA nucleotide carrying a 6-amino-5-nitro-3-yl-2(1H)-pyridone nucleobase
  modified_base 17: mod_base = OTHER; note = DNA nucleotide carrying a hypoxanthine nucleobase
  modified_base order(1..2,12,19..20,24..25): mod_base = OTHER; note = 2-Prime-Fluoro modified nucleoside
  modified_base order(3..11,13..14,18,21..23,26): mod_base = OTHER; note = 2-Prime-O-Methyl modified nucleoside
  modified_base order(1^2,25^26): mod_base = OTHER; note = (1,3-dimethylimidazolidin-2-ylidene) Phosphoramidate linkage
  modified_base order(2..17,18..25): mod_base = OTHER; note = Phosphorothioate linkage
  modified_base 17^18: mod_base = OTHER; note = Methylphosphonate linkage
  misc_feature 1..26: note = RM109555
ggcatgatgccatacnntgccaccag

SEQ ID NO: 781 - DNA, 26 bp, synthetic construct
  source 1..26: mol_type = other DNA
  misc_feature 16..17: note = DNA
  misc_feature order(1..15,18..26): note = RNA
  modified_base 15: mod_base = OTHER; note = 2-Prime-O-Methoxyethyl modified 5-methyl Cytidine
  modified_base 16: mod_base = OTHER; note = DNA nucleotide carrying a 6-amino-5-nitro-3-yl-2(1H)-pyridone nucleobase
  modified_base 17: mod_base = OTHER; note = DNA nucleotide carrying a hypoxanthine nucleobase
  modified_base order(2,12,19..20,24): mod_base = OTHER; note = 2-Prime-Fluoro modified nucleoside
  modified_base order(1,3..11,13..14,18,21..23,25..26): mod_base = OTHER; note = 2-Prime-O-Methyl modified nucleoside
  modified_base order(1^2,25^26): mod_base = OTHER; note = (1,3-dimethylimidazolidin-2-ylidene) Phosphoramidate linkage
  modified_base order(2..17,18..25): mod_base = OTHER; note = Phosphorothioate linkage
  modified_base 17^18: mod_base = OTHER; note = Methylphosphonate linkage
  misc_feature 1..26: note = RM109556
ggcatgatgccatacnntgccaccag

SEQ ID NO: 782 - DNA, 29 bp, synthetic construct
  source 1..29: mol_type = other DNA
  misc_feature 21..22: note = DNA
  misc_feature order(1..20,23..29): note = RNA
  modified_base 20: mod_base = OTHER; note = 2-Prime-O-Methoxyethyl modified 5-methyl Cytidine
  modified_base 21: mod_base = OTHER; note = DNA nucleotide carrying a 6-amino-5-nitro-3-yl-2(1H)-pyridone nucleobase
  modified_base 22: mod_base = OTHER; note = DNA nucleotide carrying a hypoxanthine nucleobase
  modified_base order(7,17,24..25,29): mod_base = OTHER; note = 2-Prime-Fluoro modified nucleoside
  modified_base order(1..6,8..16,18..19,23,26..28): mod_base = OTHER; note = 2-Prime-O-Methyl modified nucleoside
  modified_base order(1^2,28^29): mod_base = OTHER; note = (1,3-dimethylimidazolidin-2-ylidene) Phosphoramidate linkage
  modified_base order(2..22,23..28): mod_base = OTHER; note = Phosphorothioate linkage
  modified_base 22^23: mod_base = OTHER; note = Methylphosphonate linkage
  misc_feature 1..29: note = RM109557
tgaggggcatgatgccatacnntgccacc

SEQ ID NO: 783 - DNA, 29 bp, synthetic construct
  source 1..29: mol_type = other DNA
  misc_feature 18..19: note = DNA
  misc_feature order(1..17,20..29): note = RNA
  modified_base 17: mod_base = OTHER; note = 2-Prime-O-Methoxyethyl modified 5-methyl Cytidine
  modified_base 18: mod_base = OTHER; note = DNA nucleotide carrying a 6-amino-5-nitro-3-yl-2(1H)-pyridone nucleobase
  modified_base 19: mod_base = OTHER; note = DNA nucleotide carrying a hypoxanthine nucleobase
  modified_base order(4,14,21..22,26): mod_base = OTHER; note = 2-Prime-Fluoro modified nucleoside
  modified_base order(1..3,5..13,15..16,20,23..25,27..29): mod_base = OTHER; note = 2-Prime-O-Methyl modified nucleoside
  modified_base order(1^2,28^29): mod_base = OTHER; note = (1,3-dimethylimidazolidin-2-ylidene) Phosphoramidate linkage
  modified_base order(2..19,20..28): mod_base = OTHER; note = Phosphorothioate linkage
  modified_base 19^20: mod_base = OTHER; note = Methylphosphonate linkage
  misc_feature 1..29: note = RM109558
ggggcatgatgccatacnntgccaccagg

SEQ ID NO: 784 - DNA, 29 bp, synthetic construct
  source 1..29: mol_type = other DNA
  misc_feature 15..16: note = DNA
  misc_feature order(1..14,17..29): note = RNA
  modified_base 14: mod_base = OTHER; note = 2-Prime-O-Methoxyethyl modified 5-methyl Cytidine
  modified_base 15: mod_base = OTHER; note = DNA nucleotide carrying a 6-amino-5-nitro-3-yl-2(1H)-pyridone nucleobase
  modified_base 16: mod_base = OTHER; note = DNA nucleotide carrying a hypoxanthine nucleobase
  modified_base order(1,11,18..19,23): mod_base = OTHER; note = 2-Prime-Fluoro modified nucleoside
  modified_base order(2..10,12..13,17,20..22,24..29): mod_base = OTHER; note = 2-Prime-O-Methyl modified nucleoside
  modified_base order(1^2,28^29): mod_base = OTHER; note = (1,3-dimethylimidazolidin-2-ylidene) Phosphoramidate linkage
  modified_base order(2..16,17..28): mod_base = OTHER; note = Phosphorothioate linkage
  modified_base 16^17: mod_base = OTHER; note = Methylphosphonate linkage
  misc_feature 1..29: note = RM109559
gcatgatgccatacnntgccaccagggcg

SEQ ID NO: 785 - DNA, 26 bp, synthetic construct
  source 1..26: mol_type = other DNA
  misc_feature 10..11: note = DNA
  misc_feature order(1..9,12..26): note = RNA
  modified_base 9: mod_base = OTHER; note = 2-Prime-O-Methoxyethyl modified 5-methyl Cytidine
  modified_base 10: mod_base = OTHER; note = DNA nucleotide carrying a 6-amino-5-nitro-3-yl-2(1H)-pyridone nucleobase
  modified_base 11: mod_base = OTHER; note = DNA nucleotide carrying a hypoxanthine nucleobase
  modified_base order(4,8,13,16,26): mod_base = OTHER; note = 2-Prime-Fluoro modified nucleoside
  modified_base order(1..3,5..7,12,14..15,17..25): mod_base = OTHER; note = 2-Prime-O-Methyl modified nucleoside
  modified_base order(1^2,25^26): mod_base = OTHER; note = (1,3-dimethylimidazolidin-2-ylidene) Phosphoramidate linkage
  modified_base order(2..11,12..25): mod_base = OTHER; note = Phosphorothioate linkage
  modified_base 11^12: mod_base = OTHER; note = Methylphosphonate linkage
  misc_feature 1..26: note = RM109560
atgccatacnntgccaccagggcgat

SEQ ID NO: 786 - DNA, 26 bp, synthetic construct
  source 1..26: mol_type = other DNA
  misc_feature 7..8: note = DNA
  misc_feature order(1..6,9..26): note = RNA
  modified_base 6: mod_base = OTHER; note = 2-Prime-O-Methoxyethyl modified 5-methyl Cytidine
  modified_base 7: mod_base = OTHER; note = DNA nucleotide carrying a 6-amino-5-nitro-3-yl-2(1H)-pyridone nucleobase
  modified_base 8: mod_base = OTHER; note = DNA nucleotide carrying a hypoxanthine nucleobase
  modified_base order(1,5,10,13,23): mod_base = OTHER; note = 2-Prime-Fluoro modified nucleoside
  modified_base order(2..4,9,11..12,14..22,24..26): mod_base = OTHER; note = 2-Prime-O-Methyl modified nucleoside
  modified_base order(1^2,25^26): mod_base = OTHER; note = (1,3-dimethylimidazolidin-2-ylidene) Phosphoramidate linkage
  modified_base order(2..8,9..25): mod_base = OTHER; note = Phosphorothioate linkage
  modified_base 8^9: mod_base = OTHER; note = Methylphosphonate linkage
  misc_feature 1..26: note = RM109561
ccatacnntgccaccagggcgatggc

SEQ ID NO: 787 - DNA, 29 bp, synthetic construct
  source 1..29: mol_type = other DNA
  misc_feature 12..13: note = DNA
  misc_feature order(1..11,14..29): note = RNA
  modified_base 11: mod_base = OTHER; note = 2-Prime-O-Methoxyethyl modified 5-methyl Cytidine
  modified_base 12: mod_base = OTHER; note = DNA nucleotide carrying a 6-amino-5-nitro-3-yl-2(1H)-pyridone nucleobase
  modified_base 13: mod_base = OTHER; note = DNA nucleotide carrying a hypoxanthine nucleobase
  modified_base order(6,10,15,18,28): mod_base = OTHER; note = 2-Prime-Fluoro modified nucleoside
  modified_base order(1..5,7..9,14,16..17,19..27,29): mod_base = OTHER; note = 2-Prime-O-Methyl modified nucleoside
  modified_base order(1^2,28^29): mod_base = OTHER; note = (1,3-dimethylimidazolidin-2-ylidene) Phosphoramidate linkage
  modified_base order(2..13,14..28): mod_base = OTHER; note = Phosphorothioate linkage
  modified_base 13^14: mod_base = OTHER; note = Methylphosphonate linkage
  misc_feature 1..29: note = RM109562
tgatgccatacnntgccaccagggcgatg

SEQ ID NO: 788 - DNA, 29 bp, synthetic construct
  source 1..29: mol_type = other DNA
  misc_feature 9..10: note = DNA
  misc_feature order(1..8,11..29): note = RNA
  modified_base 8: mod_base = OTHER; note = 2-Prime-O-Methoxyethyl modified 5-methyl Cytidine
  modified_base 9: mod_base = OTHER; note = DNA nucleotide carrying a 6-amino-5-nitro-3-yl-2(1H)-pyridone nucleobase
  modified_base 10: mod_base = OTHER; note = DNA nucleotide carrying a hypoxanthine nucleobase
  modified_base order(3,7,12,15,25): mod_base = OTHER; note = 2-Prime-Fluoro modified nucleoside
  modified_base order(1..2,4..6,11,13..14,16..24,26..29): mod_base = OTHER; note = 2-Prime-O-Methyl modified nucleoside
  modified_base order(1^2,28^29): mod_base = OTHER; note = (1,3-dimethylimidazolidin-2-ylidene) Phosphoramidate linkage
  modified_base order(2..10,11..28): mod_base = OTHER; note = Phosphorothioate linkage
  modified_base 10^11: mod_base = OTHER; note = Methylphosphonate linkage
  misc_feature 1..29: note = RM109563
tgccatacnntgccaccagggcgatggcc

SEQ ID NO: 789 - DNA, 32 bp, synthetic construct; identical to SEQ ID NO: 186
  source 1..32: mol_type = other DNA
  misc_feature 25..26: note = DNA
  misc_feature order(1..24,27..32): note = RNA
  modified_base 24: mod_base = OTHER; note = 2-Prime-O-Methoxyethyl modified 5-methyl Cytidine
  modified_base 25: mod_base = OTHER; note = DNA nucleotide carrying a 6-amino-5-nitro-3-yl-2(1H)-pyridone nucleobase
  modified_base 26: mod_base = OTHER; note = DNA nucleotide carrying a hypoxanthine nucleobase
  modified_base order(9,12,21,28,31..32): mod_base = OTHER; note = 2-Prime-Fluoro modified nucleoside
  modified_base order(1..8,10..11,13..20,22..23,27,29..30): mod_base = OTHER; note = 2-Prime-O-Methyl modified nucleoside
  modified_base order(1^2,31^32): mod_base = OTHER; note = (1,3-dimethylimidazolidin-2-ylidene) Phosphoramidate linkage
  modified_base order(2..26,27..31): mod_base = OTHER; note = Phosphorothioate linkage
  modified_base 26^27: mod_base = OTHER; note = Methylphosphonate linkage
  misc_feature 1..32: note = RM109564

SEQ ID NO: 790 - DNA, 32 bp, synthetic construct; identical to SEQ ID NO: 187
  source 1..32: mol_type = other DNA
  misc_feature 22..23: note = DNA
  misc_feature order(1..21,24..32): note = RNA
  modified_base 21: mod_base = OTHER; note = 2-Prime-O-Methoxyethyl modified 5-methyl Cytidine
  modified_base 22: mod_base = OTHER; note = DNA nucleotide carrying a 6-amino-5-nitro-3-yl-2(1H)-pyridone nucleobase
  modified_base 23: mod_base = OTHER; note = DNA nucleotide carrying a hypoxanthine nucleobase
  modified_base order(6,9,18,25,28..29): mod_base = OTHER; note = 2-Prime-Fluoro modified nucleoside
  modified_base order(1..5,7..8,10..17,19..20,24,26..27,30..32): mod_base = OTHER; note = 2-Prime-O-Methyl modified nucleoside
  modified_base order(1^2,31^32): mod_base = OTHER; note = (1,3-dimethylimidazolidin-2-ylidene) Phosphoramidate linkage
  modified_base order(2..23,24..31): mod_base = OTHER; note = Phosphorothioate linkage
  modified_base 23^24: mod_base = OTHER; note = Methylphosphonate linkage
  misc_feature 1..32: note = RM109565

SEQ ID NO: 791 - DNA, 32 bp, synthetic construct; identical to SEQ ID NO: 5
  source 1..32: mol_type = other DNA
  misc_feature 19..20: note = DNA
  misc_feature order(1..18,21..32): note = RNA
  modified_base 18: mod_base = OTHER; note = 2-Prime-O-Methoxyethyl modified 5-methyl Cytidine
  modified_base 19: mod_base = OTHER; note = DNA nucleotide carrying a 6-amino-5-nitro-3-yl-2(1H)-pyridone nucleobase
  modified_base 20: mod_base = OTHER; note = DNA nucleotide carrying a hypoxanthine nucleobase
  modified_base order(3,6,15,22,25..26): mod_base = OTHER; note = 2-Prime-Fluoro modified nucleoside
  modified_base order(1..2,4..5,7..14,16..17,21,23..24,27..32): mod_base = OTHER; note = 2-Prime-O-Methyl modified nucleoside
  modified_base order(1^2,31^32): mod_base = OTHER; note = (1,3-dimethylimidazolidin-2-ylidene) Phosphoramidate linkage
  modified_base order(2..20,21..31): mod_base = OTHER; note = Phosphorothioate linkage
  modified_base 20^21: mod_base = OTHER; note = Methylphosphonate linkage
  misc_feature 1..32: note = RM109566

SEQ ID NO: 792 - DNA, 32 bp, synthetic construct; identical to SEQ ID NO: 190
  source 1..32: mol_type = other DNA
  misc_feature 13..14: note = DNA
  misc_feature order(1..12,15..32): note = RNA
  modified_base 12: mod_base = OTHER; note = 2-Prime-O-Methoxyethyl modified 5-methyl Cytidine
  modified_base 13: mod_base = OTHER; note = DNA nucleotide carrying a 6-amino-5-nitro-3-yl-2(1H)-pyridone nucleobase
  modified_base 14: mod_base = OTHER; note = DNA nucleotide carrying a hypoxanthine nucleobase
  modified_base order(8..9,16,19,28,31): mod_base = OTHER; note = 2-Prime-Fluoro modified nucleoside
  modified_base order(1..7,10..11,15,17..18,20..27,29..30,32): mod_base = OTHER; note = 2-Prime-O-Methyl modified nucleoside
  modified_base order(1^2,31^32): mod_base = OTHER; note = (1,3-dimethylimidazolidin-2-ylidene) Phosphoramidate linkage
  modified_base order(2..14,15..31): mod_base = OTHER; note = Phosphorothioate linkage
  modified_base 14^15: mod_base = OTHER; note = Methylphosphonate linkage
  misc_feature 1..32: note = RM109567

SEQ ID NO: 793 - DNA, 32 bp, synthetic construct; identical to SEQ ID NO: 191
  source 1..32: mol_type = other DNA
  misc_feature 10..11: note = DNA
  misc_feature order(1..9,12..32): note = RNA
  modified_base 9: mod_base = OTHER; note = 2-Prime-O-Methoxyethyl modified 5-methyl Cytidine
  modified_base 10: mod_base = OTHER; note = DNA nucleotide carrying a 6-amino-5-nitro-3-yl-2(1H)-pyridone nucleobase
  modified_base 11: mod_base = OTHER; note = DNA nucleotide carrying a hypoxanthine nucleobase
  modified_base order(5..6,13,16,25,28): mod_base = OTHER; note = 2-Prime-Fluoro modified nucleoside
  modified_base order(1..4,7..8,12,14..15,17..24,26..27,29..32): mod_base = OTHER; note = 2-Prime-O-Methyl modified nucleoside
  modified_base order(1^2,31^32): mod_base = OTHER; note = (1,3-dimethylimidazolidin-2-ylidene) Phosphoramidate linkage
  modified_base order(2..11,12..31): mod_base = OTHER; note = Phosphorothioate linkage
  modified_base 11^12: mod_base = OTHER; note = Methylphosphonate linkage
  misc_feature 1..32: note = RM109568

SEQ ID NO: 794 - DNA, 32 bp, synthetic construct; identical to SEQ ID NO: 192
  source 1..32: mol_type = other DNA
  misc_feature 7..8: note = DNA
  misc_feature order(1..6,9..32): note = RNA
  modified_base 6: mod_base = OTHER; note = 2-Prime-O-Methoxyethyl modified 5-methyl Cytidine
  modified_base 7: mod_base = OTHER; note = DNA nucleotide carrying a 6-amino-5-nitro-3-yl-2(1H)-pyridone nucleobase
  modified_base 8: mod_base = OTHER; note = DNA nucleotide carrying a hypoxanthine nucleobase
  modified_base order(2..3,10,13,22,25): mod_base = OTHER; note = 2-Prime-Fluoro modified nucleoside
  modified_base order(1,4..5,9,11..12,14..21,23..24,26..32): mod_base = OTHER; note = 2-Prime-O-Methyl modified nucleoside
  modified_base order(1^2,31^32): mod_base = OTHER; note = (1,3-dimethylimidazolidin-2-ylidene) Phosphoramidate linkage
  modified_base order(2..8,9..31): mod_base = OTHER; note = Phosphorothioate linkage
  modified_base 8^9: mod_base = OTHER; note = Methylphosphonate linkage
  misc_feature 1..32: note = RM109569

SEQ ID NO: 795 - DNA, 23 bp, synthetic construct
  source 1..23: mol_type = other DNA
  misc_feature 18..19: note = DNA
  misc_feature order(1..17,20..23): note = RNA
  modified_base 17: mod_base = OTHER; note = 2-Prime-O-Methoxyethyl modified 5-methyl Cytidine
  modified_base 18: mod_base = OTHER; note = DNA nucleotide carrying a 6-amino-5-nitro-3-yl-2(1H)-pyridone nucleobase
  modified_base 19: mod_base = OTHER; note = DNA nucleotide carrying a hypoxanthine nucleobase
  modified_base order(2,5,14,21): mod_base = OTHER; note = 2-Prime-Fluoro modified nucleoside
  modified_base order(1,3..4,6..13,15..16,20,22..23): mod_base = OTHER; note = 2-Prime-O-Methyl modified nucleoside
  modified_base order(1^2,22^23): mod_base = OTHER; note = (1,3-dimethylimidazolidin-2-ylidene) Phosphoramidate linkage
  modified_base order(2..19,20..22): mod_base = OTHER; note = Phosphorothioate linkage
  modified_base 19^20: mod_base = OTHER; note = Methylphosphonate linkage
  misc_feature 1..23: note = RM109570
ggggcatgatgccatacnntgcc

SEQ ID NO: 796 - DNA, 29 bp, synthetic construct
  source 1..29: mol_type = other DNA
  misc_feature 21..22: note = DNA
  misc_feature order(1..20,23..29): note = RNA
  modified_base 20: mod_base = OTHER; note = 2-Prime-O-Methoxyethyl modified 5-methyl Cytidine
  modified_base 21: mod_base = OTHER; note = DNA nucleotide carrying a 6-amino-5-nitro-3-yl-2(1H)-pyridone nucleobase
  modified_base 22: mod_base = OTHER; note = DNA nucleotide carrying a hypoxanthine nucleobase
  modified_base order(3,6..7,10,16,19,24,28): mod_base = OTHER; note = 2-Prime-Fluoro modified nucleoside
  modified_base order(1..2,4..5,8..9,11..15,17..18,23,25..27,29): mod_base = OTHER; note = 2-Prime-O-Methyl modified nucleoside
  modified_base order(1^2,28^29): mod_base = OTHER; note = (1,3-dimethylimidazolidin-2-ylidene) Phosphoramidate linkage
  modified_base order(2..22,23..28): mod_base = OTHER; note = Phosphorothioate linkage
  modified_base 22^23: mod_base = OTHER; note = Methylphosphonate linkage
  misc_feature 1..29: note = RM109571
tgaggggcatgatgccatacnntgccacc

SEQ ID NO: 797 - DNA, 29 bp, synthetic construct
  source 1..29: mol_type = other DNA
  misc_feature 9..10: note = DNA
  misc_feature order(1..8,11..29): note = RNA
  modified_base 8: mod_base = OTHER; note = 2-Prime-O-Methoxyethyl modified 5-methyl Cytidine
  modified_base 9: mod_base = OTHER; note = DNA nucleotide carrying a 6-amino-5-nitro-3-yl-2(1H)-pyridone nucleobase
  modified_base 10: mod_base = OTHER; note = DNA nucleotide carrying a hypoxanthine nucleobase
  modified_base order(4,12..13,16,22,25..26,29): mod_base = OTHER; note = 2-Prime-Fluoro modified nucleoside
  modified_base order(1..3,5..7,11,14..15,17..21,23..24,27..28): mod_base = OTHER; note = 2-Prime-O-Methyl modified nucleoside
  modified_base order(1^2,28^29): mod_base = OTHER; note = (1,3-dimethylimidazolidin-2-ylidene) Phosphoramidate linkage
  modified_base order(2..10,11..28): mod_base = OTHER; note = Phosphorothioate linkage
  modified_base 10^11: mod_base = OTHER; note = Methylphosphonate linkage
  misc_feature 1..29: note = RM109572
tgccatacnntgccaccagggcgatggcc

SEQ ID NO: 798 - DNA, 29 bp, synthetic construct
  source 1..29: mol_type = other DNA
  misc_feature 6..7: note = DNA
  misc_feature order(1..5,8..29): note = RNA
  modified_base 5: mod_base = OTHER; note = 2-Prime-O-Methoxyethyl modified 5-methyl Cytidine
  modified_base 6: mod_base = OTHER; note = DNA nucleotide carrying a 6-amino-5-nitro-3-yl-2(1H)-pyridone nucleobase
  modified_base 7: mod_base = OTHER; note = DNA nucleotide carrying a hypoxanthine nucleobase
  modified_base order(1,9..10,13,19,22..23,26): mod_base = OTHER; note = 2-Prime-Fluoro modified nucleoside
  modified_base order(2..4,8,11..12,14..18,20..21,24..25,27..29): mod_base = OTHER; note = 2-Prime-O-Methyl modified nucleoside
  modified_base order(1^2,28^29): mod_base = OTHER; note = (1,3-dimethylimidazolidin-2-ylidene) Phosphoramidate linkage
  modified_base order(2..7,8..28): mod_base = OTHER; note = Phosphorothioate linkage
  modified_base 7^8: mod_base = OTHER; note = Methylphosphonate linkage
  misc_feature 1..29: note = RM109573
catacnntgccaccagggcgatggccagc

SEQ ID NO: 799 - DNA, 26 bp, synthetic construct
  source 1..26: mol_type = other DNA
  misc_feature 19..20: note = DNA
  misc_feature order(1..18,21..26): note = RNA
  modified_base 18: mod_base = OTHER; note = 2-Prime-O-Methoxyethyl modified 5-methyl Cytidine
  modified_base 19: mod_base = OTHER; note = DNA nucleotide carrying a 6-amino-5-nitro-3-yl-2(1H)-pyridone nucleobase
  modified_base 20: mod_base = OTHER; note = DNA nucleotide carrying a hypoxanthine nucleobase
  modified_base order(8,14,17,22,26): mod_base = OTHER; note = 2-Prime-Fluoro modified nucleoside
  modified_base order(1..7,9..13,15..16,21,23..25): mod_base = OTHER; note = 2-Prime-O-Methyl modified nucleoside
  modified_base order(1^2,25^26): mod_base = OTHER; note = (1,3-dimethylimidazolidin-2-ylidene) Phosphoramidate linkage
  modified_base order(2..20,21..25): mod_base = OTHER; note = Phosphorothioate linkage
  modified_base 20^21: mod_base = OTHER; note = Methylphosphonate linkage
  misc_feature 1..26: note = RM109574
aggggcatgatgccatacnntgccac

SEQ ID NO: 800 - DNA, 26 bp, synthetic construct
  source 1..26: mol_type = other DNA
  misc_feature 16..17: note = DNA
  misc_feature order(1..15,18..26): note = RNA
  modified_base 15: mod_base = OTHER; note = 2-Prime-O-Methoxyethyl modified 5-methyl Cytidine
  modified_base 16: mod_base = OTHER; note = DNA nucleotide carrying a 6-amino-5-nitro-3-yl-2(1H)-pyridone nucleobase
  modified_base 17: mod_base = OTHER; note = DNA nucleotide carrying a hypoxanthine nucleobase
  modified_base order(5,11,14,19,23): mod_base = OTHER; note = 2-Prime-Fluoro modified nucleoside
  modified_base order(1..4,6..10,12..13,18,20..22,24..26): mod_base = OTHER; note = 2-Prime-O-Methyl modified nucleoside
  modified_base order(1^2,25^26): mod_base = OTHER; note = (1,3-dimethylimidazolidin-2-ylidene) Phosphoramidate linkage
  modified_base order(2..17,18..25): mod_base = OTHER; note = Phosphorothioate linkage
  modified_base 17^18: mod_base = OTHER; note = Methylphosphonate linkage
  misc_feature 1..26: note = RM109575
ggcatgatgccatacnntgccaccag

SEQ ID NO: 801 - DNA, 26 bp, synthetic construct
  source 1..26: mol_type = other DNA
  misc_feature 13..14: note = DNA
  misc_feature order(1..12,15..26): note = RNA
  modified_base 12: mod_base = OTHER; note = 2-Prime-O-Methoxyethyl modified 5-methyl Cytidine
  modified_base 13: mod_base = OTHER; note = DNA nucleotide carrying a 6-amino-5-nitro-3-yl-2(1H)-pyridone nucleobase
  modified_base 14: mod_base = OTHER; note = DNA nucleotide carrying a hypoxanthine nucleobase
  modified_base order(2,8,11,16,20): mod_base = OTHER; note = 2-Prime-Fluoro modified nucleoside
  modified_base order(1,3..7,9..10,15,17..19,21..26): mod_base = OTHER; note = 2-Prime-O-Methyl modified nucleoside
  modified_base order(1^2,25^26): mod_base = OTHER; note = (1,3-dimethylimidazolidin-2-ylidene) Phosphoramidate linkage
  modified_base order(2..14,15..25): mod_base = OTHER; note = Phosphorothioate linkage
  modified_base 14^15: mod_base = OTHER; note = Methylphosphonate linkage
  misc_feature 1..26: note = RM109576
atgatgccatacnntgccaccagggc

SEQ ID NO: 802 - DNA, 29 bp, synthetic construct
  source 1..29: mol_type = other DNA
  misc_feature 21..22: note = DNA
  misc_feature order(1..20,23..29): note = RNA
  modified_base 20: mod_base = OTHER; note = 2-Prime-O-Methoxyethyl modified 5-methyl Cytidine
  modified_base 21: mod_base = OTHER; note = DNA nucleotide carrying a 6-amino-5-nitro-3-yl-2(1H)-pyridone nucleobase
  modified_base 22: mod_base = OTHER; note = DNA nucleotide carrying a hypoxanthine nucleobase
  modified_base order(10,16,19,24,28): mod_base = OTHER; note = 2-Prime-Fluoro modified nucleoside
  modified_base order(1..9,11..15,17..18,23,25..27,29): mod_base = OTHER; note = 2-Prime-O-Methyl modified nucleoside
  modified_base order(1^2,28^29): mod_base = OTHER; note = (1,3-dimethylimidazolidin-2-ylidene) Phosphoramidate linkage
  modified_base order(2..22,23..28): mod_base = OTHER; note = Phosphorothioate linkage
  modified_base 22^23: mod_base = OTHER; note = Methylphosphonate linkage
  misc_feature 1..29: note = RM109577
tgaggggcatgatgccatacnntgccacc

SEQ ID NO: 803 - DNA, 29 bp, synthetic construct
  source 1..29: mol_type = other DNA
  misc_feature 18..19: note = DNA
  misc_feature order(1..17,20..29): note = RNA
  modified_base 17: mod_base = OTHER; note = 2-Prime-O-Methoxyethyl modified 5-methyl Cytidine
  modified_base 18: mod_base = OTHER; note = DNA nucleotide carrying a 6-amino-5-nitro-3-yl-2(1H)-pyridone nucleobase
  modified_base 19: mod_base = OTHER; note = DNA nucleotide carrying a hypoxanthine nucleobase
  modified_base order(7,13,16,21,25): mod_base = OTHER; note = 2-Prime-Fluoro modified nucleoside
  modified_base order(1..6,8..12,14..15,20,22..24,26..29): mod_base = OTHER; note = 2-Prime-O-Methyl modified nucleoside
  modified_base order(1^2,28^29): mod_base = OTHER; note = (1,3-dimethylimidazolidin-2-ylidene) Phosphoramidate linkage
  modified_base order(2..19,20..28): mod_base = OTHER; note = Phosphorothioate linkage
  modified_base 19^20: mod_base = OTHER; note = Methylphosphonate linkage
  misc_feature 1..29: note = RM109578
ggggcatgatgccatacnntgccaccagg

SEQ ID NO: 804 - DNA, 29 bp, synthetic construct
  source 1..29: mol_type = other DNA
  misc_feature 15..16: note = DNA
  misc_feature order(1..14,17..29): note = RNA
  modified_base 14: mod_base = OTHER; note = 2-Prime-O-Methoxyethyl modified 5-methyl Cytidine
  modified_base 15: mod_base = OTHER; note = DNA nucleotide carrying a 6-amino-5-nitro-3-yl-2(1H)-pyridone nucleobase
  modified_base 16: mod_base = OTHER; note = DNA nucleotide carrying a hypoxanthine nucleobase
  modified_base order(4,10,13,18,22): mod_base = OTHER; note = 2-Prime-Fluoro modified nucleoside
  modified_base order(1..3,5..9,11..12,17,19..21,23..29): mod_base = OTHER; note = 2-Prime-O-Methyl modified nucleoside
  modified_base order(1^2,28^29): mod_base = OTHER; note = (1,3-dimethylimidazolidin-2-ylidene) Phosphoramidate linkage
  modified_base order(2..16,17..28): mod_base = OTHER; note = Phosphorothioate linkage
  modified_base 16^17: mod_base = OTHER; note = Methylphosphonate linkage
  misc_feature 1..29: note = RM109579
gcatgatgccatacnntgccaccagggcg

SEQ ID NO: 805 - DNA, 29 bp, synthetic construct
  source 1..29: mol_type = other DNA
  misc_feature 12..13: note = DNA
  misc_feature order(1..11,14..29): note = RNA
  modified_base 11: mod_base = OTHER; note = 2-Prime-O-Methoxyethyl modified 5-methyl Cytidine
  modified_base 12: mod_base = OTHER; note = DNA nucleotide carrying a 6-amino-5-nitro-3-yl-2(1H)-pyridone nucleobase
  modified_base 13: mod_base = OTHER; note = DNA nucleotide carrying a hypoxanthine nucleobase
  modified_base order(1,7,10,15,19): mod_base = OTHER; note = 2-Prime-Fluoro modified nucleoside
  modified_base order(2..6,8..9,14,16..18,20..29): mod_base = OTHER; note = 2-Prime-O-Methyl modified nucleoside
  modified_base order(1^2,28^29): mod_base = OTHER; note = (1,3-dimethylimidazolidin-2-ylidene) Phosphoramidate linkage
  modified_base order(2..13,14..28): mod_base = OTHER; note = Phosphorothioate linkage
  modified_base 13^14: mod_base = OTHER; note = Methylphosphonate linkage
  misc_feature 1..29: note = RM109580
tgatgccatacnntgccaccagggcgatg

SEQ ID NO: 806 - DNA, 26 bp, synthetic construct
  source 1..26: mol_type = other DNA
  misc_feature 13..14: note = DNA
  misc_feature order(1..12,15..26): note = RNA
  modified_base 12: mod_base = OTHER; note = 2-Prime-O-Methoxyethyl modified 5-methyl Cytidine
  modified_base 13: mod_base = OTHER; note = DNA nucleotide carrying a 6-amino-5-nitro-3-yl-2(1H)-pyridone nucleobase
  modified_base 14: mod_base = OTHER; note = DNA nucleotide carrying a hypoxanthine nucleobase
  modified_base order(8,16..17,20,26): mod_base = OTHER; note = 2-Prime-Fluoro modified nucleoside
  modified_base order(1..7,9..11,15,18..19,21..25): mod_base = OTHER; note = 2-Prime-O-Methyl modified nucleoside
  modified_base order(1^2,25^26): mod_base = OTHER; note = (1,3-dimethylimidazolidin-2-ylidene) Phosphoramidate linkage
  modified_base order(2..14,15..25): mod_base = OTHER; note = Phosphorothioate linkage
  modified_base 14^15: mod_base = OTHER; note = Methylphosphonate linkage
  misc_feature 1..26: note = RM109581
atgatgccatacnntgccaccagggc

SEQ ID NO: 807 - DNA, 26 bp, synthetic construct
  source 1..26: mol_type = other DNA
  misc_feature 10..11: note = DNA
  misc_feature order(1..9,12..26): note = RNA
  modified_base 9: mod_base = OTHER; note = 2-Prime-O-Methoxyethyl modified 5-methyl Cytidine
  modified_base 10: mod_base = OTHER; note = DNA nucleotide carrying a 6-amino-5-nitro-3-yl-2(1H)-pyridone nucleobase
  modified_base 11: mod_base = OTHER; note = DNA nucleotide carrying a hypoxanthine nucleobase
  modified_base order(5,13..14,17,23): mod_base = OTHER; note = 2-Prime-Fluoro modified nucleoside
  modified_base order(1..4,6..8,12,15..16,18..22,24..26): mod_base = OTHER; note = 2-Prime-O-Methyl modified nucleoside
  modified_base order(1^2,25^26): mod_base = OTHER; note = (1,3-dimethylimidazolidin-2-ylidene) Phosphoramidate linkage
  modified_base order(2..11,12..25): mod_base = OTHER; note = Phosphorothioate linkage
  modified_base 11^12: mod_base = OTHER; note = Methylphosphonate linkage
  misc_feature 1..26: note = RM109582
atgccatacnntgccaccagggcgat

SEQ ID NO: 808 - DNA, 26 bp, synthetic construct
  source 1..26: mol_type = other DNA
  misc_feature 7..8: note = DNA
  misc_feature order(1..6,9..26): note = RNA
  modified_base 6: mod_base = OTHER; note = 2-Prime-O-Methoxyethyl modified 5-methyl Cytidine
  modified_base 7: mod_base = OTHER; note = DNA nucleotide carrying a 6-amino-5-nitro-3-yl-2(1H)-pyridone nucleobase
  modified_base 8: mod_base = OTHER; note = DNA nucleotide carrying a hypoxanthine nucleobase
  modified_base order(2,10..11,14,20): mod_base = OTHER; note = 2-Prime-Fluoro modified nucleoside
  modified_base order(1,3..5,9,12..13,15..19,21..26): mod_base = OTHER; note = 2-Prime-O-Methyl modified nucleoside
  modified_base order(1^2,25^26): mod_base = OTHER; note = (1,3-dimethylimidazolidin-2-ylidene) Phosphoramidate linkage
  modified_base order(2..8,9..25): mod_base = OTHER; note = Phosphorothioate linkage
  modified_base 8^9: mod_base = OTHER; note = Methylphosphonate linkage
  misc_feature 1..26: note = RM109583
ccatacnntgccaccagggcgatggc

SEQ ID NO: 809 - DNA, 29 bp, synthetic construct
  source 1..29: mol_type = other DNA
  misc_feature 15..16: note = DNA
  misc_feature order(1..14,17..29): note = RNA
  modified_base 14: mod_base = OTHER; note = 2-Prime-O-Methoxyethyl modified 5-methyl Cytidine
  modified_base 15: mod_base = OTHER; note = DNA nucleotide carrying a 6-amino-5-nitro-3-yl-2(1H)-pyridone nucleobase
  modified_base 16: mod_base = OTHER; note = DNA nucleotide carrying a hypoxanthine nucleobase
  modified_base order(10,18..19,22,28): mod_base = OTHER; note = 2-Prime-Fluoro modified nucleoside
  modified_base order(1..9,11..13,17,20..21,23..27,29): mod_base = OTHER; note = 2-Prime-O-Methyl modified nucleoside
  modified_base order(1^2,28^29): mod_base = OTHER; note = (1,3-dimethylimidazolidin-2-ylidene) Phosphoramidate linkage
  modified_base order(2..16,17..28): mod_base = OTHER; note = Phosphorothioate linkage
  modified_base 16^17: mod_base = OTHER; note = Methylphosphonate linkage
  misc_feature 1..29: note = RM109584
gcatgatgccatacnntgccaccagggcg

SEQ ID NO: 810 - DNA, 29 bp, synthetic construct
  source 1..29: mol_type = other DNA
  misc_feature 12..13: note = DNA
  misc_feature order(1..11,14..29): note = RNA
  modified_base 11: mod_base = OTHER; note = 2-Prime-O-Methoxyethyl modified 5-methyl Cytidine
  modified_base 12: mod_base = OTHER; note = DNA nucleotide carrying a 6-amino-5-nitro-3-yl-2(1H)-pyridone nucleobase
  modified_base 13: mod_base = OTHER; note = DNA nucleotide carrying a hypoxanthine nucleobase
  modified_base order(7,15..16,19,25): mod_base = OTHER; note = 2-Prime-Fluoro modified nucleoside
  modified_base order(1..6,8..10,14,17..18,20..24,26..29): mod_base = OTHER; note = 2-Prime-O-Methyl modified nucleoside
  modified_base order(1^2,28^29): mod_base = OTHER; note = (1,3-dimethylimidazolidin-2-ylidene) Phosphoramidate linkage
  modified_base order(2..13,14..28): mod_base = OTHER; note = Phosphorothioate linkage
  modified_base 13^14: mod_base = OTHER; note = Methylphosphonate linkage
  misc_feature 1..29: note = RM109585
tgatgccatacnntgccaccagggcgatg

SEQ ID NO: 811 - DNA, 29 bp, synthetic construct
  source 1..29: mol_type = other DNA
  misc_feature 9..10: note = DNA
  misc_feature order(1..8,11..29): note = RNA
  modified_base 8: mod_base = OTHER; note = 2-Prime-O-Methoxyethyl modified 5-methyl Cytidine
  modified_base 9: mod_base = OTHER; note = DNA nucleotide carrying a 6-amino-5-nitro-3-yl-2(1H)-pyridone nucleobase
  modified_base 10: mod_base = OTHER; note = DNA nucleotide carrying a hypoxanthine nucleobase
  modified_base order(4,12..13,16,22): mod_base = OTHER; note = 2-Prime-Fluoro modified nucleoside
  modified_base order(1..3,5..7,11,14..15,17..21,23..29): mod_base = OTHER; note = 2-Prime-O-Methyl modified nucleoside
  modified_base order(1^2,28^29): mod_base = OTHER; note = (1,3-dimethylimidazolidin-2-ylidene) Phosphoramidate linkage
  modified_base order(2..10,11..28): mod_base = OTHER; note = Phosphorothioate linkage
  modified_base 10^11: mod_base = OTHER; note = Methylphosphonate linkage
  misc_feature 1..29: note = RM109586
tgccatacnntgccaccagggcgatggcc

SEQ ID NO: 812 - DNA, 29 bp, synthetic construct
  source 1..29: mol_type = other DNA
  misc_feature 6..7: note = DNA
  misc_feature order(1..5,8..29): note = RNA
  modified_base 5: mod_base = OTHER; note = 2-Prime-O-Methoxyethyl modified 5-methyl Cytidine
  modified_base 6: mod_base = OTHER; note = DNA nucleotide carrying a 6-amino-5-nitro-3-yl-2(1H)-pyridone nucleobase
  modified_base 7: mod_base = OTHER; note = DNA nucleotide carrying a hypoxanthine nucleobase
  modified_base order(1,9..10,13,19): mod_base = OTHER; note = 2-Prime-Fluoro modified nucleoside
  modified_base order(2..4,8,11..12,14..18,20..29): mod_base = OTHER; note = 2-Prime-O-Methyl modified nucleoside
  modified_base order(1^2,28^29): mod_base = OTHER; note = (1,3-dimethylimidazolidin-2-ylidene) Phosphoramidate linkage
  modified_base order(2..7,8..28): mod_base = OTHER; note = Phosphorothioate linkage
  modified_base 7^8: mod_base = OTHER; note = Methylphosphonate linkage
  misc_feature 1..29: note = RM109587
catacnntgccaccagggcgatggccagc

SEQ ID NO: 813 - DNA, 26 bp, synthetic construct
  source 1..26: mol_type = other DNA
  misc_feature 22..23: note = DNA
  misc_feature order(1..21,24..26): note = RNA
  modified_base 21: mod_base = OTHER; note = 2-Prime-O-Methoxyethyl modified 5-methyl Cytidine
  modified_base 22: mod_base = OTHER; note = DNA nucleotide carrying a 6-amino-5-nitro-3-yl-2(1H)-pyridone nucleobase
  modified_base 23: mod_base = OTHER; note = DNA nucleotide carrying a hypoxanthine nucleobase
  modified_base order(5,7,13,16,18..19,25): mod_base = OTHER; note = 2-Prime-Fluoro modified nucleoside
  modified_base order(1..4,6,8..12,14..15,17,20,24,26): mod_base = OTHER; note = 2-Prime-O-Methyl modified nucleoside
  modified_base order(1^2,25^26): mod_base = OTHER; note = (1,3-dimethylimidazolidin-2-ylidene) Phosphoramidate linkage
  modified_base order(2..23,24^25): mod_base = OTHER; note = Phosphorothioate linkage
  modified_base 23^24: mod_base = OTHER; note = Methylphosphonate linkage
  misc_feature 1..26: note = RM109588
gtgaggggcatgatgccatacnntgc

SEQ ID NO: 814 - DNA, 26 bp, synthetic construct
  source 1..26: mol_type = other DNA
  misc_feature 19..20: note = DNA
  misc_feature order(1..18,21..26): note = RNA
  modified_base 18: mod_base = OTHER; note = 2-Prime-O-Methoxyethyl modified 5-methyl Cytidine
  modified_base 19: mod_base = OTHER; note = DNA nucleotide carrying a 6-amino-5-nitro-3-yl-2(1H)-pyridone nucleobase
  modified_base 20: mod_base = OTHER; note = DNA nucleotide carrying a hypoxanthine nucleobase
  modified_base order(2,4,10,13,15..16,22): mod_base = OTHER; note = 2-Prime-Fluoro modified nucleoside
  modified_base order(1,3,5..9,11..12,14,17,21,23..26): mod_base = OTHER; note = 2-Prime-O-Methyl modified nucleoside
  modified_base order(1^2,25^26): mod_base = OTHER; note = (1,3-dimethylimidazolidin-2-ylidene) Phosphoramidate linkage
  modified_base order(2..20,21..25): mod_base = OTHER; note = Phosphorothioate linkage
  modified_base 20^21: mod_base = OTHER; note = Methylphosphonate linkage
  misc_feature 1..26: note = RM109589
aggggcatgatgccatacnntgccac

SEQ ID NO: 815 - DNA, 26 bp, synthetic construct
  source 1..26: mol_type = other DNA
  misc_feature 22..23: note = DNA
  misc_feature order(1..21,24..26): note = RNA
  modified_base 21: mod_base = OTHER; note = 2-Prime-O-Methoxyethyl modified 5-methyl Cytidine
  modified_base 22: mod_base = OTHER; note = DNA nucleotide carrying a 6-amino-5-nitro-3-yl-2(1H)-pyridone nucleobase
  modified_base 23: mod_base = OTHER; note = DNA nucleotide carrying a hypoxanthine nucleobase
  modified_base order(13,16,18..19,25): mod_base = OTHER; note = 2-Prime-Fluoro modified nucleoside
  modified_base order(1..12,14..15,17,20,24,26): mod_base = OTHER; note = 2-Prime-O-Methyl modified nucleoside
  modified_base order(1^2,25^26): mod_base = OTHER; note = (1,3-dimethylimidazolidin-2-ylidene) Phosphoramidate linkage
  modified_base order(2..23,24^25): mod_base = OTHER; note = Phosphorothioate linkage
  modified_base 23^24: mod_base = OTHER; note = Methylphosphonate linkage
  misc_feature 1..26: note = RM109590
gtgaggggcatgatgccatacnntgc

SEQ ID NO: 816 - DNA, 26 bp, synthetic construct
  source 1..26: mol_type = other DNA
  misc_feature 19..20: note = DNA
  misc_feature order(1..18,21..26): note = RNA
  modified_base 18: mod_base = OTHER; note = 2-Prime-O-Methoxyethyl modified 5-methyl Cytidine
  modified_base 19: mod_base = OTHER; note = DNA nucleotide carrying a 6-amino-5-nitro-3-yl-2(1H)-pyridone nucleobase
  modified_base 20: mod_base = OTHER; note = DNA nucleotide carrying a hypoxanthine nucleobase
  modified_base order(10,13,15..16,22): mod_base = OTHER; note = 2-Prime-Fluoro modified nucleoside
  modified_base order(1..9,11..12,14,17,21,23..26): mod_base = OTHER; note = 2-Prime-O-Methyl modified nucleoside
  modified_base order(1^2,25^26): mod_base = OTHER; note = (1,3-dimethylimidazolidin-2-ylidene) Phosphoramidate linkage
  modified_base order(2..20,21..25): mod_base = OTHER; note = Phosphorothioate linkage
  modified_base 20^21: mod_base = OTHER; note = Methylphosphonate linkage
  misc_feature 1..26: note = RM109591
aggggcatgatgccatacnntgccac

SEQ ID NO: 817 - DNA, 26 bp, synthetic construct
  source 1..26: mol_type = other DNA
  misc_feature 16..17: note = DNA
  misc_feature order(1..15,18..26): note = RNA
  modified_base 15: mod_base = OTHER; note = 2-Prime-O-Methoxyethyl modified 5-methyl Cytidine
  modified_base 16: mod_base = OTHER; note = DNA nucleotide carrying a 6-amino-5-nitro-3-yl-2(1H)-pyridone nucleobase
  modified_base 17: mod_base = OTHER; note = DNA nucleotide carrying a hypoxanthine nucleobase
  modified_base order(7,10,12..13,19): mod_base = OTHER; note = 2-Prime-Fluoro modified nucleoside
  modified_base order(1..6,8..9,11,14,18,20..26): mod_base = OTHER; note = 2-Prime-O-Methyl modified nucleoside
  modified_base order(1^2,25^26): mod_base = OTHER; note = (1,3-dimethylimidazolidin-2-ylidene) Phosphoramidate linkage
  modified_base order(2..17,18..25): mod_base = OTHER; note = Phosphorothioate linkage
  modified_base 17^18: mod_base = OTHER; note = Methylphosphonate linkage
  misc_feature 1..26: note = RM109592
ggcatgatgccatacnntgccaccag

SEQ ID NO: 818 - DNA, 26 bp, synthetic construct
  source 1..26: mol_type = other DNA
  misc_feature 13..14: note = DNA
  misc_feature order(1..12,15..26): note = RNA
  modified_base 12: mod_base = OTHER; note = 2-Prime-O-Methoxyethyl modified 5-methyl Cytidine
  modified_base 13: mod_base = OTHER; note = DNA nucleotide carrying a 6-amino-5-nitro-3-yl-2(1H)-pyridone nucleobase
  modified_base 14: mod_base = OTHER; note = DNA nucleotide carrying a hypoxanthine nucleobase
  modified_base order(4,7,9..10,16): mod_base = OTHER; note = 2-Prime-Fluoro modified nucleoside
  modified_base order(1..3,5..6,8,11,15,17..26): mod_base = OTHER; note = 2-Prime-O-Methyl modified nucleoside
  modified_base order(1^2,25^26): mod_base = OTHER; note = (1,3-dimethylimidazolidin-2-ylidene) Phosphoramidate linkage
  modified_base order(2..14,15..25): mod_base = OTHER; note = Phosphorothioate linkage
  modified_base 14^15: mod_base = OTHER; note = Methylphosphonate linkage
  misc_feature 1..26: note = RM109593
atgatgccatacnntgccaccagggc

SEQ ID NO: 819 - DNA, 26 bp, synthetic construct
  source 1..26: mol_type = other DNA
  misc_feature 10..11: note = DNA
  misc_feature order(1..9,12..26): note = RNA
  modified_base 9: mod_base = OTHER; note = 2-Prime-O-Methoxyethyl modified 5-methyl Cytidine
  modified_base 10: mod_base = OTHER; note = DNA nucleotide carrying a 6-amino-5-nitro-3-yl-2(1H)-pyridone nucleobase
  modified_base 11: mod_base = OTHER; note = DNA nucleotide carrying a hypoxanthine nucleobase
  modified_base order(1,4,6..7,13): mod_base = OTHER; note = 2-Prime-Fluoro modified nucleoside
  modified_base order(2..3,5,8,12,14..26): mod_base = OTHER; note = 2-Prime-O-Methyl modified nucleoside
  modified_base order(1^2,25^26): mod_base = OTHER; note = (1,3-dimethylimidazolidin-2-ylidene) Phosphoramidate linkage
  modified_base order(2..11,12..25): mod_base = OTHER; note = Phosphorothioate linkage
  modified_base 11^12: mod_base = OTHER; note = Methylphosphonate linkage
  misc_feature 1..26: note = RM109594
atgccatacnntgccaccagggcgat

SEQ ID NO: 820 - DNA, 29 bp, synthetic construct
  source 1..29: mol_type = other DNA
  misc_feature 24..25: note = DNA
  misc_feature order(1..23,26..29): note = RNA
  modified_base 23: mod_base = OTHER; note = 2-Prime-O-Methoxyethyl modified 5-methyl Cytidine
  modified_base 24: mod_base = OTHER; note = DNA nucleotide carrying a 6-amino-5-nitro-3-yl-2(1H)-pyridone nucleobase
  modified_base 25: mod_base = OTHER; note = DNA nucleotide carrying a hypoxanthine nucleobase
  modified_base order(15,18,20..21,27): mod_base = OTHER; note = 2-Prime-Fluoro modified nucleoside
  modified_base order(1..14,16..17,19,22,26,28..29): mod_base = OTHER; note = 2-Prime-O-Methyl modified nucleoside
  modified_base order(1^2,28^29): mod_base = OTHER; note = (1,3-dimethylimidazolidin-2-ylidene) Phosphoramidate linkage
  modified_base order(2..25,26..28): mod_base = OTHER; note = Phosphorothioate linkage
  modified_base 25^26: mod_base = OTHER; note = Methylphosphonate linkage
  misc_feature 1..29: note = RM109595
ccgtgaggggcatgatgccatacnntgcc

SEQ ID NO: 821 - DNA, 29 bp, synthetic construct
  source 1..29: mol_type = other DNA
  misc_feature 21..22: note = DNA
  misc_feature order(1..20,23..29): note = RNA
  modified_base 20: mod_base = OTHER; note = 2-Prime-O-Methoxyethyl modified 5-methyl Cytidine
  modified_base 21: mod_base = OTHER; note = DNA nucleotide carrying a 6-amino-5-nitro-3-yl-2(1H)-pyridone nucleobase
  modified_base 22: mod_base = OTHER; note = DNA nucleotide carrying a hypoxanthine nucleobase
  modified_base order(12,15,17..18,24): mod_base = OTHER; note = 2-Prime-Fluoro modified nucleoside
  modified_base order(1..11,13..14,16,19,23,25..29): mod_base = OTHER; note = 2-Prime-O-Methyl modified nucleoside
  modified_base order(1^2,28^29): mod_base = OTHER; note = (1,3-dimethylimidazolidin-2-ylidene) Phosphoramidate linkage
  modified_base order(2..22,23..28): mod_base = OTHER; note = Phosphorothioate linkage
  modified_base 22^23: mod_base = OTHER; note = Methylphosphonate linkage
  misc_feature 1..29: note = RM109596
tgaggggcatgatgccatacnntgccacc

SEQ ID NO: 822 - DNA, 29 bp, synthetic construct
  source 1..29: mol_type = other DNA
  misc_feature 18..19: note = DNA
  misc_feature order(1..17,20..29): note = RNA
  modified_base 17: mod_base = OTHER; note = 2-Prime-O-Methoxyethyl modified 5-methyl Cytidine
  modified_base 18: mod_base = OTHER; note = DNA nucleotide carrying a 6-amino-5-nitro-3-yl-2(1H)-pyridone nucleobase
  modified_base 19: mod_base = OTHER; note = DNA nucleotide carrying a hypoxanthine nucleobase
  modified_base order(9,12,14..15,21): mod_base = OTHER; note = 2-Prime-Fluoro modified nucleoside
  modified_base order(1..8,10..11,13,16,20,22..29): mod_base = OTHER; note = 2-Prime-O-Methyl modified nucleoside
  modified_base order(1^2,28^29): mod_base = OTHER; note = (1,3-dimethylimidazolidin-2-ylidene) Phosphoramidate linkage
  modified_base order(2..19,20..28): mod_base = OTHER; note = Phosphorothioate linkage
  modified_base 19^20: mod_base = OTHER; note = Methylphosphonate linkage
  misc_feature 1..29: note = RM109597
ggggcatgatgccatacnntgccaccagg

SEQ ID NO: 823 - DNA, 29 bp, synthetic construct
  source 1..29: mol_type = other DNA
  misc_feature 15..16: note = DNA
  misc_feature order(1..14,17..29): note = RNA
  modified_base 14: mod_base = OTHER; note = 2-Prime-O-Methoxyethyl modified 5-methyl Cytidine
  modified_base 15: mod_base = OTHER; note = DNA nucleotide carrying a 6-amino-5-nitro-3-yl-2(1H)-pyridone nucleobase
  modified_base 16: mod_base = OTHER; note = DNA nucleotide carrying a hypoxanthine nucleobase
  modified_base order(6,9,11..12,18): mod_base = OTHER; note = 2-Prime-Fluoro modified nucleoside
  modified_base order(1..5,7..8,10,13,17,19..29): mod_base = OTHER; note = 2-Prime-O-Methyl modified nucleoside
  modified_base order(1^2,28^29): mod_base = OTHER; note = (1,3-dimethylimidazolidin-2-ylidene) Phosphoramidate linkage
  modified_base order(2..16,17..28): mod_base = OTHER; note = Phosphorothioate linkage
  modified_base 16^17: mod_base = OTHER; note = Methylphosphonate linkage
  misc_feature 1..29: note = RM109598
gcatgatgccatacnntgccaccagggcg

SEQ ID NO: 824 - DNA, 29 bp, synthetic construct
  source 1..29: mol_type = other DNA
  misc_feature 12..13: note = DNA
  misc_feature order(1..11,14..29): note = RNA
  modified_base 11: mod_base = OTHER; note = 2-Prime-O-Methoxyethyl modified 5-methyl Cytidine
  modified_base 12: mod_base = OTHER; note = DNA nucleotide carrying a 6-amino-5-nitro-3-yl-2(1H)-pyridone nucleobase
  modified_base 13: mod_base = OTHER; note = DNA nucleotide carrying a hypoxanthine nucleobase
  modified_base order(3,6,8..9,15): mod_base = OTHER; note = 2-Prime-Fluoro modified nucleoside
  modified_base order(1..2,4..5,7,10,14,16..29): mod_base = OTHER; note = 2-Prime-O-Methyl modified nucleoside
  modified_base order(1^2,28^29): mod_base = OTHER; note = (1,3-dimethylimidazolidin-2-ylidene) Phosphoramidate linkage
  modified_base order(2..13,14..28): mod_base = OTHER; note = Phosphorothioate linkage
  modified_base 13^14: mod_base = OTHER; note = Methylphosphonate linkage
  misc_feature 1..29: note = RM109599
tgatgccatacnntgccaccagggcgatg

SEQ ID NO: 825 - DNA, 26 bp, synthetic construct
  source 1..26: mol_type = other DNA
  misc_feature 22..23: note = DNA
  misc_feature order(1..21,24..26): note = RNA
  modified_base 21: mod_base = OTHER; note = 2-Prime-O-Methoxyethyl modified 5-methyl Cytidine
  modified_base 22: mod_base = OTHER; note = DNA nucleotide carrying a 6-amino-5-nitro-3-yl-2(1H)-pyridone nucleobase
  modified_base 23: mod_base = OTHER; note = DNA nucleotide carrying a hypoxanthine nucleobase
  modified_base order(3..4,8..9,12..13,25): mod_base = OTHER; note = 2-Prime-Fluoro modified nucleoside
  modified_base order(1..2,5..7,10..11,14..20,24,26): mod_base = OTHER; note = 2-Prime-O-Methyl modified nucleoside
  modified_base order(1^2,25^26): mod_base = OTHER; note = (1,3-dimethylimidazolidin-2-ylidene) Phosphoramidate linkage
  modified_base order(2..23,24^25): mod_base = OTHER; note = Phosphorothioate linkage
  modified_base 23^24: mod_base = OTHER; note = Methylphosphonate linkage
  misc_feature 1..26: note = RM109600
gtgaggggcatgatgccatacnntgc

SEQ ID NO: 826 - DNA, 26 bp, synthetic construct
  source 1..26: mol_type = other DNA
  misc_feature 22..23: note = DNA
  misc_feature order(1..21,24..26): note = RNA
  modified_base 21: mod_base = OTHER; note = 2-Prime-O-Methoxyethyl modified 5-methyl Cytidine
  modified_base 22: mod_base = OTHER; note = DNA nucleotide carrying a 6-amino-5-nitro-3-yl-2(1H)-pyridone nucleobase
  modified_base 23: mod_base = OTHER; note = DNA nucleotide carrying a hypoxanthine nucleobase
  modified_base order(8..9,12..13,25): mod_base = OTHER; note = 2-Prime-Fluoro modified nucleoside
  modified_base order(1..7,10..11,14..20,24,26): mod_base = OTHER; note = 2-Prime-O-Methyl modified nucleoside
  modified_base order(1^2,25^26): mod_base = OTHER; note = (1,3-dimethylimidazolidin-2-ylidene) Phosphoramidate linkage
  modified_base order(2..23,24^25): mod_base = OTHER; note = Phosphorothioate linkage
  modified_base 23^24: mod_base = OTHER; note = Methylphosphonate linkage
  misc_feature 1..26: note = RM109601
gtgaggggcatgatgccatacnntgc

SEQ ID NO: 827 - DNA, 26 bp, synthetic construct
  source 1..26: mol_type = other DNA
  misc_feature 19..20: note = DNA
  misc_feature order(1..18,21..26): note = RNA
  modified_base 18: mod_base = OTHER; note = 2-Prime-O-Methoxyethyl modified 5-methyl Cytidine
  modified_base 19: mod_base = OTHER; note = DNA nucleotide carrying a 6-amino-5-nitro-3-yl-2(1H)-pyridone nucleobase
  modified_base 20: mod_base = OTHER; note = DNA nucleotide carrying a hypoxanthine nucleobase
  modified_base order(5..6,9..10,22): mod_base = OTHER; note = 2-Prime-Fluoro modified nucleoside
  modified_base order(1..4,7..8,11..17,21,23..26): mod_base = OTHER; note = 2-Prime-O-Methyl modified nucleoside
  modified_base order(1^2,25^26): mod_base = OTHER; note = (1,3-dimethylimidazolidin-2-ylidene) Phosphoramidate linkage
  modified_base order(2..20,21..25): mod_base = OTHER; note = Phosphorothioate linkage
  modified_base 20^21: mod_base = OTHER; note = Methylphosphonate linkage
  misc_feature 1..26: note = RM109602
aggggcatgatgccatacnntgccac

SEQ ID NO: 828 - DNA, 26 bp, synthetic construct
  source 1..26: mol_type = other DNA
  misc_feature 16..17: note = DNA
  misc_feature order(1..15,18..26): note = RNA
  modified_base 15: mod_base = OTHER; note = 2-Prime-O-Methoxyethyl modified 5-methyl Cytidine
  modified_base 16: mod_base = OTHER; note = DNA nucleotide carrying a 6-amino-5-nitro-3-yl-2(1H)-pyridone nucleobase
  modified_base 17: mod_base = OTHER; note = DNA nucleotide carrying a hypoxanthine nucleobase
  modified_base order(2..3,6..7,19): mod_base = OTHER; note = 2-Prime-Fluoro modified nucleoside
  modified_base order(1,4..5,8..14,18,20..26): mod_base = OTHER; note = 2-Prime-O-Methyl modified nucleoside
  modified_base order(1^2,25^26): mod_base = OTHER; note = (1,3-dimethylimidazolidin-2-ylidene) Phosphoramidate linkage
  modified_base order(2..17,18..25): mod_base = OTHER; note = Phosphorothioate linkage
  modified_base 17^18: mod_base = OTHER; note = Methylphosphonate linkage
  misc_feature 1..26: note = RM109603
ggcatgatgccatacnntgccaccag

SEQ ID NO: 829 - DNA, 29 bp, synthetic construct
  source 1..29: mol_type = other DNA
  misc_feature 24..25: note = DNA
  misc_feature order(1..23,26..29): note = RNA
  modified_base 23: mod_base = OTHER; note = 2-Prime-O-Methoxyethyl modified 5-methyl Cytidine
  modified_base 24: mod_base = OTHER; note = DNA nucleotide carrying a 6-amino-5-nitro-3-yl-2(1H)-pyridone nucleobase
  modified_base 25: mod_base = OTHER; note = DNA nucleotide carrying a hypoxanthine nucleobase
  modified_base order(10..11,14..15,27): mod_base = OTHER; note = 2-Prime-Fluoro modified nucleoside
  modified_base order(1..9,12..13,16..22,26,28..29): mod_base = OTHER; note = 2-Prime-O-Methyl modified nucleoside
  modified_base order(1^2,28^29): mod_base = OTHER; note = (1,3-dimethylimidazolidin-2-ylidene) Phosphoramidate linkage
  modified_base order(2..25,26..28): mod_base = OTHER; note = Phosphorothioate linkage
  modified_base 25^26: mod_base = OTHER; note = Methylphosphonate linkage
  misc_feature 1..29: note = RM109604
ccgtgaggggcatgatgccatacnntgcc

SEQ ID NO: 830 - DNA, 29 bp, synthetic construct
  source 1..29: mol_type = other DNA
  misc_feature 21..22: note = DNA
  misc_feature order(1..20,23..29): note = RNA
  modified_base 20: mod_base = OTHER; note = 2-Prime-O-Methoxyethyl modified 5-methyl Cytidine
  modified_base 21: mod_base = OTHER; note = DNA nucleotide carrying a 6-amino-5-nitro-3-yl-2(1H)-pyridone nucleobase
  modified_base 22: mod_base = OTHER; note = DNA nucleotide carrying a hypoxanthine nucleobase
  modified_base order(7..8,11..12,24): mod_base = OTHER; note = 2-Prime-Fluoro modified nucleoside
  modified_base order(1..6,9..10,13..19,23,25..29): mod_base = OTHER; note = 2-Prime-O-Methyl modified nucleoside
  modified_base order(1^2,28^29): mod_base = OTHER; note = (1,3-dimethylimidazolidin-2-ylidene) Phosphoramidate linkage
  modified_base order(2..22,23..28): mod_base = OTHER; note = Phosphorothioate linkage
  modified_base 22^23: mod_base = OTHER; note = Methylphosphonate linkage
  misc_feature 1..29: note = RM109605
tgaggggcatgatgccatacnntgccacc

SEQ ID NO: 831 - DNA, 29 bp, synthetic construct
  source 1..29: mol_type = other DNA
  misc_feature 18..19: note = DNA
  misc_feature order(1..17,20..29): note = RNA
  modified_base 17: mod_base = OTHER; note = 2-Prime-O-Methoxyethyl modified 5-methyl Cytidine
  modified_base 18: mod_base = OTHER; note = DNA nucleotide carrying a 6-amino-5-nitro-3-yl-2(1H)-pyridone nucleobase
  modified_base 19: mod_base = OTHER; note = DNA nucleotide carrying a hypoxanthine nucleobase
  modified_base order(4..5,8..9,21): mod_base = OTHER; note = 2-Prime-Fluoro modified nucleoside
  modified_base order(1..3,6..7,10..16,20,22..29): mod_base = OTHER; note = 2-Prime-O-Methyl modified nucleoside
  modified_base order(1^2,28^29): mod_base = OTHER; note = (1,3-dimethylimidazolidin-2-ylidene) Phosphoramidate linkage
  modified_base order(2..19,20..28): mod_base = OTHER; note = Phosphorothioate linkage
  modified_base 19^20: mod_base = OTHER; note = Methylphosphonate linkage
  misc_feature 1..29: note = RM109606
ggggcatgatgccatacnntgccaccagg

SEQ ID NO: 832 - DNA, 29 bp, synthetic construct
  source 1..29: mol_type = other DNA
  misc_feature 15..16: note = DNA
  misc_feature order(1..14,17..29): note = RNA
  modified_base 14: mod_base = OTHER; note = 2-Prime-O-Methoxyethyl modified 5-methyl Cytidine
  modified_base 15: mod_base = OTHER; note = DNA nucleotide carrying a 6-amino-5-nitro-3-yl-2(1H)-pyridone nucleobase
  modified_base 16: mod_base = OTHER; note = DNA nucleotide carrying a hypoxanthine nucleobase
  modified_base order(1..2,5..6,18): mod_base = OTHER; note = 2-Prime-Fluoro modified nucleoside
  modified_base order(3..4,7..13,17,19..29): mod_base = OTHER; note = 2-Prime-O-Methyl modified nucleoside
  modified_base order(1^2,28^29): mod_base = OTHER; note = (1,3-dimethylimidazolidin-2-ylidene) Phosphoramidate linkage
  modified_base order(2..16,17..28): mod_base = OTHER; note = Phosphorothioate linkage
  modified_base 16^17: mod_base = OTHER; note = Methylphosphonate linkage
  misc_feature 1..29: note = RM109607
gcatgatgccatacnntgccaccagggcg

SEQ ID NO: 833 - DNA, 23 bp, synthetic construct
  source 1..23: mol_type = other DNA
  misc_feature 18..19: note = DNA
  misc_feature order(1..17,20..23): note = RNA
  modified_base 17: mod_base = OTHER; note = 2-Prime-O-Methoxyethyl modified 5-methyl Cytidine
  modified_base 18: mod_base = OTHER; note = DNA nucleotide carrying a 6-amino-5-nitro-3-yl-2(1H)-pyridone nucleobase
  modified_base 19: mod_base = OTHER; note = DNA nucleotide carrying a hypoxanthine nucleobase
  modified_base order(9,21): mod_base = OTHER; note = 2-Prime-Fluoro modified nucleoside
  modified_base order(1..8,10..16,20,22..23): mod_base = OTHER; note = 2-Prime-O-Methyl modified nucleoside
  modified_base order(1^2,22^23): mod_base = OTHER; note = (1,3-dimethylimidazolidin-2-ylidene) Phosphoramidate linkage
  modified_base order(2..19,20..22): mod_base = OTHER; note = Phosphorothioate linkage
  modified_base 19^20: mod_base = OTHER; note = Methylphosphonate linkage
  misc_feature 1..23: note = RM109608
ggggcatgatgccatacnntgcc

SEQ ID NO: 834 - DNA, 23 bp, synthetic construct
  source 1..23: mol_type = other DNA
  misc_feature 15..16: note = DNA
  misc_feature order(1..14,17..23): note = RNA
  modified_base 14: mod_base = OTHER; note = 2-Prime-O-Methoxyethyl modified 5-methyl Cytidine
  modified_base 15: mod_base = OTHER; note = DNA nucleotide carrying a 6-amino-5-nitro-3-yl-2(1H)-pyridone nucleobase
  modified_base 16: mod_base = OTHER; note = DNA nucleotide carrying a hypoxanthine nucleobase
  modified_base order(6,18): mod_base = OTHER; note = 2-Prime-Fluoro modified nucleoside
  modified_base order(1..5,7..13,17,19..23): mod_base = OTHER; note = 2-Prime-O-Methyl modified nucleoside
  modified_base order(1^2,22^23): mod_base = OTHER; note = (1,3-dimethylimidazolidin-2-ylidene) Phosphoramidate linkage
  modified_base order(2..16,17..22): mod_base = OTHER; note = Phosphorothioate linkage
  modified_base 16^17: mod_base = OTHER; note = Methylphosphonate linkage
  misc_feature 1..23: note = RM109609
gcatgatgccatacnntgccacc

SEQ ID NO: 835 - DNA, 23 bp, synthetic construct
  source 1..23: mol_type = other DNA
  misc_feature 12..13: note = DNA
  misc_feature order(1..11,14..23): note = RNA
  modified_base 11: mod_base = OTHER; note = 2-Prime-O-Methoxyethyl modified 5-methyl Cytidine
  modified_base 12: mod_base = OTHER; note = DNA nucleotide carrying a 6-amino-5-nitro-3-yl-2(1H)-pyridone nucleobase
  modified_base 13: mod_base = OTHER; note = DNA nucleotide carrying a hypoxanthine nucleobase
  modified_base order(3,15): mod_base = OTHER; note = 2-Prime-Fluoro modified nucleoside
  modified_base order(1..2,4..10,14,16..23): mod_base = OTHER; note = 2-Prime-O-Methyl modified nucleoside
  modified_base order(1^2,22^23): mod_base = OTHER; note = (1,3-dimethylimidazolidin-2-ylidene) Phosphoramidate linkage
  modified_base order(2..13,14..22): mod_base = OTHER; note = Phosphorothioate linkage
  modified_base 13^14: mod_base = OTHER; note = Methylphosphonate linkage
  misc_feature 1..23: note = RM109610
tgatgccatacnntgccaccagg

SEQ ID NO: 836 - DNA, 26 bp, synthetic construct
  source 1..26: mol_type = other DNA
  misc_feature 22..23: note = DNA
  misc_feature order(1..21,24..26): note = RNA
  modified_base 21: mod_base = OTHER; note = 2-Prime-O-Methoxyethyl modified 5-methyl Cytidine
  modified_base 22: mod_base = OTHER; note = DNA nucleotide carrying a 6-amino-5-nitro-3-yl-2(1H)-pyridone nucleobase
  modified_base 23: mod_base = OTHER; note = DNA nucleotide carrying a hypoxanthine nucleobase
  modified_base order(13,25): mod_base = OTHER; note = 2-Prime-Fluoro modified nucleoside
  modified_base order(1..12,14..20,24,26): mod_base = OTHER; note = 2-Prime-O-Methyl modified nucleoside
  modified_base order(1^2,25^26): mod_base = OTHER; note = (1,3-dimethylimidazolidin-2-ylidene) Phosphoramidate linkage
  modified_base order(2..23,24^25): mod_base = OTHER; note = Phosphorothioate linkage
  modified_base 23^24: mod_base = OTHER; note = Methylphosphonate linkage
  misc_feature 1..26: note = RM109611
gtgaggggcatgatgccatacnntgc

SEQ ID NO: 837 - DNA, 26 bp, synthetic construct
  source 1..26: mol_type = other DNA
  misc_feature 19..20: note = DNA
  misc_feature order(1..18,21..26): note = RNA
  modified_base 18: mod_base = OTHER; note = 2-Prime-O-Methoxyethyl modified 5-methyl Cytidine
  modified_base 19: mod_base = OTHER; note = DNA nucleotide carrying a 6-amino-5-nitro-3-yl-2(1H)-pyridone nucleobase
  modified_base 20: mod_base = OTHER; note = DNA nucleotide carrying a hypoxanthine nucleobase
  modified_base order(10,22): mod_base = OTHER; note = 2-Prime-Fluoro modified nucleoside
  modified_base order(1..9,11..17,21,23..26): mod_base = OTHER; note = 2-Prime-O-Methyl modified nucleoside
  modified_base order(1^2,25^26): mod_base = OTHER; note = (1,3-dimethylimidazolidin-2-ylidene) Phosphoramidate linkage
  modified_base order(2..20,21..25): mod_base = OTHER; note = Phosphorothioate linkage
  modified_base 20^21: mod_base = OTHER; note = Methylphosphonate linkage
  misc_feature 1..26: note = RM109612
aggggcatgatgccatacnntgccac

SEQ ID NO: 838 - DNA, 26 bp, synthetic construct
  source 1..26: mol_type = other DNA
  misc_feature 16..17: note = DNA
  misc_feature order(1..15,18..26): note = RNA
  modified_base 15: mod_base = OTHER; note = 2-Prime-O-Methoxyethyl modified 5-methyl Cytidine
  modified_base 16: mod_base = OTHER; note = DNA nucleotide carrying a 6-amino-5-nitro-3-yl-2(1H)-pyridone nucleobase
  modified_base 17: mod_base = OTHER; note = DNA nucleotide carrying a hypoxanthine nucleobase
  modified_base order(7,19): mod_base = OTHER; note = 2-Prime-Fluoro modified nucleoside
  modified_base order(1..6,8..14,18,20..26): mod_base = OTHER; note = 2-Prime-O-Methyl modified nucleoside
  modified_base order(1^2,25^26): mod_base = OTHER; note = (1,3-dimethylimidazolidin-2-ylidene) Phosphoramidate linkage
  modified_base order(2..17,18..25): mod_base = OTHER; note = Phosphorothioate linkage
  modified_base 17^18: mod_base = OTHER; note = Methylphosphonate linkage
  misc_feature 1..26: note = RM109613
ggcatgatgccatacnntgccaccag

SEQ ID NO: 839 - DNA, 26 bp, synthetic construct
  source 1..26: mol_type = other DNA
  misc_feature 13..14: note = DNA
  misc_feature order(1..12,15..26): note = RNA
  modified_base 12: mod_base = OTHER; note = 2-Prime-O-Methoxyethyl modified 5-methyl Cytidine
  modified_base 13: mod_base = OTHER; note = DNA nucleotide carrying a 6-amino-5-nitro-3-yl-2(1H)-pyridone nucleobase
  modified_base 14: mod_base = OTHER; note = DNA nucleotide carrying a hypoxanthine nucleobase
  modified_base order(4,16): mod_base = OTHER; note = 2-Prime-Fluoro modified nucleoside
  modified_base order(1..3,5..11,15,17..26): mod_base = OTHER; note = 2-Prime-O-Methyl modified nucleoside
  modified_base order(1^2,25^26): mod_base = OTHER; note = (1,3-dimethylimidazolidin-2-ylidene) Phosphoramidate linkage
  modified_base order(2..14,15..25): mod_base = OTHER; note = Phosphorothioate linkage
  modified_base 14^15: mod_base = OTHER; note = Methylphosphonate linkage
  misc_feature 1..26: note = RM109614
atgatgccatacnntgccaccagggc

SEQ ID NO: 840 - DNA, 26 bp, synthetic construct
  source 1..26: mol_type = other DNA
  misc_feature 10..11: note = DNA
  misc_feature order(1..9,12..26): note = RNA
  modified_base 9: mod_base = OTHER; note = 2-Prime-O-Methoxyethyl modified 5-methyl Cytidine
  modified_base 10: mod_base = OTHER; note = DNA nucleotide carrying a 6-amino-5-nitro-3-yl-2(1H)-pyridone nucleobase
  modified_base 11: mod_base = OTHER; note = DNA nucleotide carrying a hypoxanthine nucleobase
  modified_base order(1,13): mod_base = OTHER; note = 2-Prime-Fluoro modified nucleoside
  modified_base order(2..8,12,14..26): mod_base = OTHER; note = 2-Prime-O-Methyl modified nucleoside
  modified_base order(1^2,25^26): mod_base = OTHER; note = (1,3-dimethylimidazolidin-2-ylidene) Phosphoramidate linkage
  modified_base order(2..11,12..25): mod_base = OTHER; note = Phosphorothioate linkage
  modified_base 11^12: mod_base = OTHER; note = Methylphosphonate linkage
  misc_feature 1..26: note = RM109615
atgccatacnntgccaccagggcgat

SEQ ID NO: 841 - DNA, 29 bp, synthetic construct
  source 1..29: mol_type = other DNA
  misc_feature 24..25: note = DNA
  misc_feature order(1..23,26..29): note = RNA
  modified_base 23: mod_base = OTHER; note = 2-Prime-O-Methoxyethyl modified 5-methyl Cytidine
  modified_base 24: mod_base = OTHER; note = DNA nucleotide carrying a 6-amino-5-nitro-3-yl-2(1H)-pyridone nucleobase
  modified_base 25: mod_base = OTHER; note = DNA nucleotide carrying a hypoxanthine nucleobase
  modified_base order(15,27): mod_base = OTHER; note = 2-Prime-Fluoro modified nucleoside
  modified_base order(1..14,16..22,26,28..29): mod_base = OTHER; note = 2-Prime-O-Methyl modified nucleoside
  modified_base order(1^2,28^29): mod_base = OTHER; note = (1,3-dimethylimidazolidin-2-ylidene) Phosphoramidate linkage
  modified_base order(2..25,26..28): mod_base = OTHER; note = Phosphorothioate linkage
  modified_base 25^26: mod_base = OTHER; note = Methylphosphonate linkage
  misc_feature 1..29: note = RM109616
ccgtgaggggcatgatgccatacnntgcc

SEQ ID NO: 842 - DNA, 29 bp, synthetic construct
  source 1..29: mol_type = other DNA
  misc_feature 21..22: note = DNA
  misc_feature order(1..20,23..29): note = RNA
  modified_base 20: mod_base = OTHER; note = 2-Prime-O-Methoxyethyl modified 5-methyl Cytidine
  modified_base 21: mod_base = OTHER; note = DNA nucleotide carrying a 6-amino-5-nitro-3-yl-2(1H)-pyridone nucleobase
  modified_base 22: mod_base = OTHER; note = DNA nucleotide carrying a hypoxanthine nucleobase
  modified_base order(12,24): mod_base = OTHER; note = 2-Prime-Fluoro modified nucleoside
  modified_base order(1..11,13..19,23,25..29): mod_base = OTHER; note = 2-Prime-O-Methyl modified nucleoside
  modified_base order(1^2,28^29): mod_base = OTHER; note = (1,3-dimethylimidazolidin-2-ylidene) Phosphoramidate linkage
  modified_base order(2..22,23..28): mod_base = OTHER; note = Phosphorothioate linkage
  modified_base 22^23: mod_base = OTHER; note = Methylphosphonate linkage
  misc_feature 1..29: note = RM109617
tgaggggcatgatgccatacnntgccacc

SEQ ID NO: 843 - DNA, 29 bp, synthetic construct
  source 1..29: mol_type = other DNA
  misc_feature 18..19: note = DNA
  misc_feature order(1..17,20..29): note = RNA
  modified_base 17: mod_base = OTHER; note = 2-Prime-O-Methoxyethyl modified 5-methyl Cytidine
  modified_base 18: mod_base = OTHER; note = DNA nucleotide carrying a 6-amino-5-nitro-3-yl-2(1H)-pyridone nucleobase
  modified_base 19: mod_base = OTHER; note = DNA nucleotide carrying a hypoxanthine nucleobase
  modified_base order(9,21): mod_base = OTHER; note = 2-Prime-Fluoro modified nucleoside
  modified_base order(1..8,10..16,20,22..29): mod_base = OTHER; note = 2-Prime-O-Methyl modified nucleoside
  modified_base order(1^2,28^29): mod_base = OTHER; note = (1,3-dimethylimidazolidin-2-ylidene) Phosphoramidate linkage
  modified_base order(2..19,20..28): mod_base = OTHER; note = Phosphorothioate linkage
  modified_base 19^20: mod_base = OTHER; note = Methylphosphonate linkage
  misc_feature 1..29: note = RM109618
ggggcatgatgccatacnntgccaccagg

SEQ ID NO: 844 - DNA, 29 bp, synthetic construct
  source 1..29: mol_type = other DNA
  misc_feature 15..16: note = DNA
  misc_feature order(1..14,17..29): note = RNA
  modified_base 14: mod_base = OTHER; note = 2-Prime-O-Methoxyethyl modified 5-methyl Cytidine
  modified_base 15: mod_base = OTHER; note = DNA nucleotide carrying a 6-amino-5-nitro-3-yl-2(1H)-pyridone nucleobase
  modified_base 16: mod_base = OTHER; note = DNA nucleotide carrying a hypoxanthine nucleobase
  modified_base order(6,18): mod_base = OTHER; note = 2-Prime-Fluoro modified nucleoside
  modified_base order(1..5,7..13,17,19..29): mod_base = OTHER; note = 2-Prime-O-Methyl modified nucleoside
  modified_base order(1^2,28^29): mod_base = OTHER; note = (1,3-dimethylimidazolidin-2-ylidene) Phosphoramidate linkage
  modified_base order(2..16,17..28): mod_base = OTHER; note = Phosphorothioate linkage
  modified_base 16^17: mod_base = OTHER; note = Methylphosphonate linkage
  misc_feature 1..29: note = RM109619
gcatgatgccatacnntgccaccagggcg

SEQ ID NO: 845 - DNA, 29 bp, synthetic construct
  source 1..29: mol_type = other DNA
  misc_feature 12..13: note = DNA
  misc_feature order(1..11,14..29): note = RNA
  modified_base 11: mod_base = OTHER; note = 2-Prime-O-Methoxyethyl modified 5-methyl Cytidine
  modified_base 12: mod_base = OTHER; note = DNA nucleotide carrying a 6-amino-5-nitro-3-yl-2(1H)-pyridone nucleobase
  modified_base 13: mod_base = OTHER; note = DNA nucleotide carrying a hypoxanthine nucleobase
  modified_base order(3,15): mod_base = OTHER; note = 2-Prime-Fluoro modified nucleoside
  modified_base order(1..2,4..10,14,16..29): mod_base = OTHER; note = 2-Prime-O-Methyl modified nucleoside
  modified_base order(1^2,28^29): mod_base = OTHER; note = (1,3-dimethylimidazolidin-2-ylidene) Phosphoramidate linkage
  modified_base order(2..13,14..28): mod_base = OTHER; note = Phosphorothioate linkage
  modified_base 13^14: mod_base = OTHER; note = Methylphosphonate linkage
  misc_feature 1..29: note = RM109620
tgatgccatacnntgccaccagggcgatg

SEQ ID NO: 846 - DNA, 32 bp, synthetic construct; identical to SEQ ID NO: 191
  source 1..32: mol_type = other DNA
  misc_feature 10..11: note = DNA
  misc_feature order(1..9,12..32): note = RNA
  modified_base 9: mod_base = OTHER; note = 2-Prime-O-Methoxyethyl modified 5-methyl Cytidine
  modified_base 10: mod_base = OTHER; note = DNA nucleotide carrying a 6-amino-5-nitro-3-yl-2(1H)-pyridone nucleobase
  modified_base 11: mod_base = OTHER; note = DNA nucleotide carrying a hypoxanthine nucleobase
  modified_base order(3,13..14,24,29..30): mod_base = OTHER; note = 2-Prime-Fluoro modified nucleoside
  modified_base order(1..2,4..8,12,15..23,25..28,31..32): mod_base = OTHER; note = 2-Prime-O-Methyl modified nucleoside
  modified_base order(1^2,31^32): mod_base = OTHER; note = (1,3-dimethylimidazolidin-2-ylidene) Phosphoramidate linkage
  modified_base order(2..11,12..31): mod_base = OTHER; note = Phosphorothioate linkage
  modified_base 11^12: mod_base = OTHER; note = Methylphosphonate linkage
  misc_feature 1..32: note = RM109621

SEQ ID NO: 847 - DNA, 32 bp, synthetic construct; identical to SEQ ID NO: 187
  source 1..32: mol_type = other DNA
  misc_feature 22..23: note = DNA
  misc_feature order(1..21,24..32): note = RNA
  modified_base 21: mod_base = OTHER; note = 2-Prime-O-Methoxyethyl modified 5-methyl Cytidine
  modified_base 22: mod_base = OTHER; note = DNA nucleotide carrying a 6-amino-5-nitro-3-yl-2(1H)-pyridone nucleobase
  modified_base 23: mod_base = OTHER; note = DNA nucleotide carrying a hypoxanthine nucleobase
  modified_base order(4..5,10,20,25,31): mod_base = OTHER; note = 2-Prime-Fluoro modified nucleoside
  modified_base order(1..3,6..9,11..19,24,26..30,32): mod_base = OTHER; note = 2-Prime-O-Methyl modified nucleoside
  modified_base order(1^2,31^32): mod_base = OTHER; note = (1,3-dimethylimidazolidin-2-ylidene) Phosphoramidate linkage
  modified_base order(2..23,24..31): mod_base = OTHER; note = Phosphorothioate linkage
  modified_base 23^24: mod_base = OTHER; note = Methylphosphonate linkage
  misc_feature 1..32: note = RM109622

SEQ ID NO: 848 - DNA, 32 bp, synthetic construct; identical to SEQ ID NO: 5
  source 1..32: mol_type = other DNA
  misc_feature 19..20: note = DNA
  misc_feature order(1..18,21..32): note = RNA
  modified_base 18: mod_base = OTHER; note = 2-Prime-O-Methoxyethyl modified 5-methyl Cytidine
  modified_base 19: mod_base = OTHER; note = DNA nucleotide carrying a 6-amino-5-nitro-3-yl-2(1H)-pyridone nucleobase
  modified_base 20: mod_base = OTHER; note = DNA nucleotide carrying a hypoxanthine nucleobase
  modified_base order(1..2,7,17,22,28): mod_base = OTHER; note = 2-Prime-Fluoro modified nucleoside
  modified_base order(3..6,8..16,21,23..27,29..32): mod_base = OTHER; note = 2-Prime-O-Methyl modified nucleoside
  modified_base order(1^2,31^32): mod_base = OTHER; note = (1,3-dimethylimidazolidin-2-ylidene) Phosphoramidate linkage
  modified_base order(2..20,21..31): mod_base = OTHER; note = Phosphorothioate linkage
  modified_base 20^21: mod_base = OTHER; note = Methylphosphonate linkage
  misc_feature 1..32: note = RM109623

SEQ ID NO: 849 - DNA, 23 bp, synthetic construct
  source 1..23: mol_type = other DNA
  misc_feature 9..10: note = DNA
  misc_feature order(1..8,11..23): note = RNA
  modified_base 8: mod_base = OTHER; note = 2-Prime-O-Methoxyethyl modified 5-methyl Cytidine
  modified_base 9: mod_base = OTHER; note = DNA nucleotide carrying a 6-amino-5-nitro-3-yl-2(1H)-pyridone nucleobase
  modified_base 10: mod_base = OTHER; note = DNA nucleotide carrying a hypoxanthine nucleobase
  modified_base order(2,12..13,23): mod_base = OTHER; note = 2-Prime-Fluoro modified nucleoside
  modified_base order(1,3..7,11,14..22): mod_base = OTHER; note = 2-Prime-O-Methyl modified nucleoside
  modified_base order(1^2,22^23): mod_base = OTHER; note = (1,3-dimethylimidazolidin-2-ylidene) Phosphoramidate linkage
  modified_base order(2..10,11..22): mod_base = OTHER; note = Phosphorothioate linkage
  modified_base 10^11: mod_base = OTHER; note = Methylphosphonate linkage
  misc_feature 1..23: note = RM109624
tgccatacnntgccaccagggcg

SEQ ID NO: 850 - DNA, 23 bp, synthetic construct
  source 1..23: mol_type = other DNA
  misc_feature 18..19: note = DNA
  misc_feature order(1..17,20..23): note = RNA
  modified_base 17: mod_base = OTHER; note = 2-Prime-O-Methoxyethyl modified 5-methyl Cytidine
  modified_base 18: mod_base = OTHER; note = DNA nucleotide carrying a 6-amino-5-nitro-3-yl-2(1H)-pyridone nucleobase
  modified_base 19: mod_base = OTHER; note = DNA nucleotide carrying a hypoxanthine nucleobase
  modified_base order(11,21): mod_base = OTHER; note = 2-Prime-Fluoro modified nucleoside
  modified_base order(1..10,12..16,20,22..23): mod_base = OTHER; note = 2-Prime-O-Methyl modified nucleoside
  modified_base order(1^2,22^23): mod_base = OTHER; note = (1,3-dimethylimidazolidin-2-ylidene) Phosphoramidate linkage
  modified_base order(2..19,20..22): mod_base = OTHER; note = Phosphorothioate linkage
  modified_base 19^20: mod_base = OTHER; note = Methylphosphonate linkage
  misc_feature 1..23: note = RM109625
ggggcatgatgccatacnntgcc

SEQ ID NO: 851 - DNA, 23 bp, synthetic construct
  source 1..23: mol_type = other DNA
  misc_feature 15..16: note = DNA
  misc_feature order(1..14,17..23): note = RNA
  modified_base 14: mod_base = OTHER; note = 2-Prime-O-Methoxyethyl modified 5-methyl Cytidine
  modified_base 15: mod_base = OTHER; note = DNA nucleotide carrying a 6-amino-5-nitro-3-yl-2(1H)-pyridone nucleobase
  modified_base 16: mod_base = OTHER; note = DNA nucleotide carrying a hypoxanthine nucleobase
  modified_base order(8,18): mod_base = OTHER; note = 2-Prime-Fluoro modified nucleoside
  modified_base order(1..7,9..13,17,19..23): mod_base = OTHER; note = 2-Prime-O-Methyl modified nucleoside
  modified_base order(1^2,22^23): mod_base = OTHER; note = (1,3-dimethylimidazolidin-2-ylidene) Phosphoramidate linkage
  modified_base order(2..16,17..22): mod_base = OTHER; note = Phosphorothioate linkage
  modified_base 16^17: mod_base = OTHER; note = Methylphosphonate linkage
  misc_feature 1..23: note = RM109626
gcatgatgccatacnntgccacc

SEQ ID NO: 852 - DNA, 23 bp, synthetic construct
  source 1..23: mol_type = other DNA
  misc_feature 12..13: note = DNA
  misc_feature order(1..11,14..23): note = RNA
  modified_base 11: mod_base = OTHER; note = 2-Prime-O-Methoxyethyl modified 5-methyl Cytidine
  modified_base 12: mod_base = OTHER; note = DNA nucleotide carrying a 6-amino-5-nitro-3-yl-2(1H)-pyridone nucleobase
  modified_base 13: mod_base = OTHER; note = DNA nucleotide carrying a hypoxanthine nucleobase
  modified_base order(5,15): mod_base = OTHER; note = 2-Prime-Fluoro modified nucleoside
  modified_base order(1..4,6..10,14,16..23): mod_base = OTHER; note = 2-Prime-O-Methyl modified nucleoside
  modified_base order(1^2,22^23): mod_base = OTHER; note = (1,3-dimethylimidazolidin-2-ylidene) Phosphoramidate linkage
  modified_base order(2..13,14..22): mod_base = OTHER; note = Phosphorothioate linkage
  modified_base 13^14: mod_base = OTHER; note = Methylphosphonate linkage
  misc_feature 1..23: note = RM109627
tgatgccatacnntgccaccagg

SEQ ID NO: 853 - DNA, 23 bp, synthetic construct
  source 1..23: mol_type = other DNA
  misc_feature 9..10: note = DNA
  misc_feature order(1..8,11..23): note = RNA
  modified_base 8: mod_base = OTHER; note = 2-Prime-O-Methoxyethyl modified 5-methyl Cytidine
  modified_base 9: mod_base = OTHER; note = DNA nucleotide carrying a 6-amino-5-nitro-3-yl-2(1H)-pyridone nucleobase
  modified_base 10: mod_base = OTHER; note = DNA nucleotide carrying a hypoxanthine nucleobase
  modified_base order(2,12): mod_base = OTHER; note = 2-Prime-Fluoro modified nucleoside
  modified_base order(1,3..7,11,13..23): mod_base = OTHER; note = 2-Prime-O-Methyl modified nucleoside
  modified_base order(1^2,22^23): mod_base = OTHER; note = (1,3-dimethylimidazolidin-2-ylidene) Phosphoramidate linkage
  modified_base order(2..10,11..22): mod_base = OTHER; note = Phosphorothioate linkage
  modified_base 10^11: mod_base = OTHER; note = Methylphosphonate linkage
  misc_feature 1..23: note = RM109628
tgccatacnntgccaccagggcg

SEQ ID NO: 854 - DNA, 26 bp, synthetic construct
  source 1..26: mol_type = other DNA
  misc_feature 22..23: note = DNA
  misc_feature order(1..21,24..26): note = RNA
  modified_base 21: mod_base = OTHER; note = 2-Prime-O-Methoxyethyl modified 5-methyl Cytidine
  modified_base 22: mod_base = OTHER; note = DNA nucleotide carrying a 6-amino-5-nitro-3-yl-2(1H)-pyridone nucleobase
  modified_base 23: mod_base = OTHER; note = DNA nucleotide carrying a hypoxanthine nucleobase
  modified_base order(15,25): mod_base = OTHER; note = 2-Prime-Fluoro modified nucleoside
  modified_base order(1..14,16..20,24,26): mod_base = OTHER; note = 2-Prime-O-Methyl modified nucleoside
  modified_base order(1^2,25^26): mod_base = OTHER; note = (1,3-dimethylimidazolidin-2-ylidene) Phosphoramidate linkage
  modified_base order(2..23,24^25): mod_base = OTHER; note = Phosphorothioate linkage
  modified_base 23^24: mod_base = OTHER; note = Methylphosphonate linkage
  misc_feature 1..26: note = RM109629
gtgaggggcatgatgccatacnntgc

SEQ ID NO: 855 - DNA, 26 bp, synthetic construct
  source 1..26: mol_type = other DNA
  misc_feature 19..20: note = DNA
  misc_feature order(1..18,21..26): note = RNA
  modified_base 18: mod_base = OTHER; note = 2-Prime-O-Methoxyethyl modified 5-methyl Cytidine
  modified_base 19: mod_base = OTHER; note = DNA nucleotide carrying a 6-amino-5-nitro-3-yl-2(1H)-pyridone nucleobase
  modified_base 20: mod_base = OTHER; note = DNA nucleotide carrying a hypoxanthine nucleobase
  modified_base order(12,22): mod_base = OTHER; note = 2-Prime-Fluoro modified nucleoside
  modified_base order(1..11,13..17,21,23..26): mod_base = OTHER; note = 2-Prime-O-Methyl modified nucleoside
  modified_base order(1^2,25^26): mod_base = OTHER; note = (1,3-dimethylimidazolidin-2-ylidene) Phosphoramidate linkage
  modified_base order(2..20,21..25): mod_base = OTHER; note = Phosphorothioate linkage
  modified_base 20^21: mod_base = OTHER; note = Methylphosphonate linkage
  misc_feature 1..26: note = RM109630
aggggcatgatgccatacnntgccac

SEQ ID NO: 856 - DNA, 26 bp, synthetic construct
  source 1..26: mol_type = other DNA
  misc_feature 16..17: note = DNA
  misc_feature order(1..15,18..26): note = RNA
  modified_base 15: mod_base = OTHER; note = 2-Prime-O-Methoxyethyl modified 5-methyl Cytidine
  modified_base 16: mod_base = OTHER; note = DNA nucleotide carrying a 6-amino-5-nitro-3-yl-2(1H)-pyridone nucleobase
  modified_base 17: mod_base = OTHER; note = DNA nucleotide carrying a hypoxanthine nucleobase
  modified_base order(9,19): mod_base = OTHER; note = 2-Prime-Fluoro modified nucleoside
  modified_base order(1..8,10..14,18,20..26): mod_base = OTHER; note = 2-Prime-O-Methyl modified nucleoside
  modified_base order(1^2,25^26): mod_base = OTHER; note = (1,3-dimethylimidazolidin-2-ylidene) Phosphoramidate linkage
  modified_base order(2..17,18..25): mod_base = OTHER; note = Phosphorothioate linkage
  modified_base 17^18: mod_base = OTHER; note = Methylphosphonate linkage
  misc_feature 1..26: note = RM109631
ggcatgatgccatacnntgccaccag

SEQ ID NO: 857 - DNA, 26 bp, synthetic construct
  source 1..26: mol_type = other DNA
  misc_feature 13..14: note = DNA
  misc_feature order(1..12,15..26): note = RNA
  modified_base 12: mod_base = OTHER; note = 2-Prime-O-Methoxyethyl modified 5-methyl Cytidine
  modified_base 13: mod_base = OTHER; note = DNA nucleotide carrying a 6-amino-5-nitro-3-yl-2(1H)-pyridone nucleobase
  modified_base 14: mod_base = OTHER; note = DNA nucleotide carrying a hypoxanthine nucleobase
  modified_base order(6,16): mod_base = OTHER; note = 2-Prime-Fluoro modified nucleoside
  modified_base order(1..5,7..11,15,17..26): mod_base = OTHER; note = 2-Prime-O-Methyl modified nucleoside
  modified_base order(1^2,25^26): mod_base = OTHER; note = (1,3-dimethylimidazolidin-2-ylidene) Phosphoramidate linkage
  modified_base order(2..14,15..25): mod_base = OTHER; note = Phosphorothioate linkage
  modified_base 14^15: mod_base = OTHER; note = Methylphosphonate linkage
  misc_feature 1..26: note = RM109632
atgatgccatacnntgccaccagggc

SEQ ID NO: 858 - DNA, 26 bp, synthetic construct
  source 1..26: mol_type = other DNA
  misc_feature 10..11: note = DNA
  misc_feature order(1..9,12..26): note = RNA
  modified_base 9: mod_base = OTHER; note = 2-Prime-O-Methoxyethyl modified 5-methyl Cytidine
  modified_base 10: mod_base = OTHER; note = DNA nucleotide carrying a 6-amino-5-nitro-3-yl-2(1H)-pyridone nucleobase
  modified_base 11: mod_base = OTHER; note = DNA nucleotide carrying a hypoxanthine nucleobase
  modified_base order(3,13): mod_base = OTHER; note = 2-Prime-Fluoro modified nucleoside
  modified_base order(1..2,4..8,12,14..26): mod_base = OTHER; note = 2-Prime-O-Methyl modified nucleoside
  modified_base order(1^2,25^26): mod_base = OTHER; note = (1,3-dimethylimidazolidin-2-ylidene) Phosphoramidate linkage
  modified_base order(2..11,12..25): mod_base = OTHER; note = Phosphorothioate linkage
  modified_base 11^12: mod_base = OTHER; note = Methylphosphonate linkage
  misc_feature 1..26: note = RM109633
atgccatacnntgccaccagggcgat

SEQ ID NO: 859 - DNA, 29 bp, synthetic construct
  source 1..29: mol_type = other DNA
  misc_feature 24..25: note = DNA
  misc_feature order(1..23,26..29): note = RNA
  modified_base 23: mod_base = OTHER; note = 2-Prime-O-Methoxyethyl modified 5-methyl Cytidine
  modified_base 24: mod_base = OTHER; note = DNA nucleotide carrying a 6-amino-5-nitro-3-yl-2(1H)-pyridone nucleobase
  modified_base 25: mod_base = OTHER; note = DNA nucleotide carrying a hypoxanthine nucleobase
  modified_base order(17,27): mod_base = OTHER; note = 2-Prime-Fluoro modified nucleoside
  modified_base order(1..16,18..22,26,28..29): mod_base = OTHER; note = 2-Prime-O-Methyl modified nucleoside
  modified_base order(1^2,28^29): mod_base = OTHER; note = (1,3-dimethylimidazolidin-2-ylidene) Phosphoramidate linkage
  modified_base order(2..25,26..28): mod_base = OTHER; note = Phosphorothioate linkage
  modified_base 25^26: mod_base = OTHER; note = Methylphosphonate linkage
  misc_feature 1..29: note = RM109634
ccgtgaggggcatgatgccatacnntgcc

SEQ ID NO: 860 - DNA, 29 bp, synthetic construct
  source 1..29: mol_type = other DNA
  misc_feature 21..22: note = DNA
  misc_feature order(1..20,23..29): note = RNA
  modified_base 20: mod_base = OTHER; note = 2-Prime-O-Methoxyethyl modified 5-methyl Cytidine
  modified_base 21: mod_base = OTHER; note = DNA nucleotide carrying a 6-amino-5-nitro-3-yl-2(1H)-pyridone nucleobase
  modified_base 22: mod_base = OTHER; note = DNA nucleotide carrying a hypoxanthine nucleobase
  modified_base order(14,24): mod_base = OTHER; note = 2-Prime-Fluoro modified nucleoside
  modified_base order(1..13,15..19,23,25..29): mod_base = OTHER; note = 2-Prime-O-Methyl modified nucleoside
  modified_base order(1^2,28^29): mod_base = OTHER; note = (1,3-dimethylimidazolidin-2-ylidene) Phosphoramidate linkage
  modified_base order(2..22,23..28): mod_base = OTHER; note = Phosphorothioate linkage
  modified_base 22^23: mod_base = OTHER; note = Methylphosphonate linkage
  misc_feature 1..29: note = RM109635
tgaggggcatgatgccatacnntgccacc

SEQ ID NO: 861 - DNA, 29 bp, synthetic construct
  source 1..29: mol_type = other DNA
  misc_feature 18..19: note = DNA
  misc_feature order(1..17,20..29): note = RNA
  modified_base 17: mod_base = OTHER; note = 2-Prime-O-Methoxyethyl modified 5-methyl Cytidine
  modified_base 18: mod_base = OTHER; note = DNA nucleotide carrying a 6-amino-5-nitro-3-yl-2(1H)-pyridone nucleobase
  modified_base 19: mod_base = OTHER; note = DNA nucleotide carrying a hypoxanthine nucleobase
  modified_base order(11,21): mod_base = OTHER; note = 2-Prime-Fluoro modified nucleoside
  modified_base order(1..10,12..16,20,22..29): mod_base = OTHER; note = 2-Prime-O-Methyl modified nucleoside
  modified_base order(1^2,28^29): mod_base = OTHER; note = (1,3-dimethylimidazolidin-2-ylidene) Phosphoramidate linkage
  modified_base order(2..19,20..28): mod_base = OTHER; note = Phosphorothioate linkage
  modified_base 19^20: mod_base = OTHER; note = Methylphosphonate linkage
  misc_feature 1..29: note = RM109636
ggggcatgatgccatacnntgccaccagg

SEQ ID NO: 862 - DNA, 29 bp, synthetic construct
  source 1..29: mol_type = other DNA
  misc_feature 15..16: note = DNA
  misc_feature order(1..14,17..29): note = RNA
  modified_base 14: mod_base = OTHER; note = 2-Prime-O-Methoxyethyl modified 5-methyl Cytidine
  modified_base 15: mod_base = OTHER; note = DNA nucleotide carrying a 6-amino-5-nitro-3-yl-2(1H)-pyridone nucleobase
  modified_base 16: mod_base = OTHER; note = DNA nucleotide carrying a hypoxanthine nucleobase
  modified_base order(8,18): mod_base = OTHER; note = 2-Prime-Fluoro modified nucleoside
  modified_base order(1..7,9..13,17,19..29): mod_base = OTHER; note = 2-Prime-O-Methyl modified nucleoside
  modified_base order(1^2,28^29): mod_base = OTHER; note = (1,3-dimethylimidazolidin-2-ylidene) Phosphoramidate linkage
  modified_base order(2..16,17..28): mod_base = OTHER; note = Phosphorothioate linkage
  modified_base 16^17: mod_base = OTHER; note = Methylphosphonate linkage
  misc_feature 1..29: note = RM109637
gcatgatgccatacnntgccaccagggcg

SEQ ID NO: 863 - DNA, 29 bp, synthetic construct
  source 1..29: mol_type = other DNA
  misc_feature 12..13: note = DNA
  misc_feature order(1..11,14..29): note = RNA
  modified_base 11: mod_base = OTHER; note = 2-Prime-O-Methoxyethyl modified 5-methyl Cytidine
  modified_base 12: mod_base = OTHER; note = DNA nucleotide carrying a 6-amino-5-nitro-3-yl-2(1H)-pyridone nucleobase
  modified_base 13: mod_base = OTHER; note = DNA nucleotide carrying a hypoxanthine nucleobase
  modified_base order(5,15): mod_base = OTHER; note = 2-Prime-Fluoro modified nucleoside
  modified_base order(1..4,6..10,14,16..29): mod_base = OTHER; note = 2-Prime-O-Methyl modified nucleoside
  modified_base order(1^2,28^29): mod_base = OTHER; note = (1,3-dimethylimidazolidin-2-ylidene) Phosphoramidate linkage
  modified_base order(2..13,14..28): mod_base = OTHER; note = Phosphorothioate linkage
  modified_base 13^14: mod_base = OTHER; note = Methylphosphonate linkage
  misc_feature 1..29: note = RM109638
tgatgccatacnntgccaccagggcgatg

SEQ ID NO: 864 - DNA, 29 bp, synthetic construct
  source 1..29: mol_type = other DNA
  misc_feature 9..10: note = DNA
  misc_feature order(1..8,11..29): note = RNA
  modified_base 8: mod_base = OTHER; note = 2-Prime-O-Methoxyethyl modified 5-methyl Cytidine
  modified_base 9: mod_base = OTHER; note = DNA nucleotide carrying a 6-amino-5-nitro-3-yl-2(1H)-pyridone nucleobase
  modified_base 10: mod_base = OTHER; note = DNA nucleotide carrying a hypoxanthine nucleobase
  modified_base order(2,12): mod_base = OTHER; note = 2-Prime-Fluoro modified nucleoside
  modified_base order(1,3..7,11,13..29): mod_base = OTHER; note = 2-Prime-O-Methyl modified nucleoside
  modified_base order(1^2,28^29): mod_base = OTHER; note = (1,3-dimethylimidazolidin-2-ylidene) Phosphoramidate linkage
  modified_base order(2..10,11..28): mod_base = OTHER; note = Phosphorothioate linkage
  modified_base 10^11: mod_base = OTHER; note = Methylphosphonate linkage
  misc_feature 1..29: note = RM109639
tgccatacnntgccaccagggcgatggcc

SEQ ID NO: 865 - DNA, 32 bp, synthetic construct; identical to SEQ ID NO: 5
  source 1..32: mol_type = other DNA
  misc_feature 19..20: note = DNA
  misc_feature order(1..18,21..32): note = RNA
  modified_base 18: mod_base = OTHER; note = 2-Prime-O-Methoxyethyl modified 5-methyl Cytidine
  modified_base 19: mod_base = OTHER; note = DNA nucleotide carrying a 6-amino-5-nitro-3-yl-2(1H)-pyridone nucleobase
  modified_base 20: mod_base = OTHER; note = DNA nucleotide carrying a hypoxanthine nucleobase
  modified_base order(1,15..17,22..23,25,29..30): mod_base = OTHER; note = 2-Prime-Fluoro modified nucleoside
  modified_base order(2..14,21,24,26..28,31..32): mod_base = OTHER; note = 2-Prime-O-Methyl modified nucleoside
  modified_base order(1^2,31^32): mod_base = OTHER; note = (1,3-dimethylimidazolidin-2-ylidene) Phosphoramidate linkage
  modified_base order(2..20,21..31): mod_base = OTHER; note = Phosphorothioate linkage
  modified_base 20^21: mod_base = OTHER; note = Methylphosphonate linkage
  misc_feature 1..32: note = RM109640

SEQ ID NO: 866 - DNA, 32 bp, synthetic construct; identical to SEQ ID NO: 191
  source 1..32: mol_type = other DNA
  misc_feature 10..11: note = DNA
  misc_feature order(1..9,12..32): note = RNA
  modified_base 9: mod_base = OTHER; note = 2-Prime-O-Methoxyethyl modified 5-methyl Cytidine
  modified_base 10: mod_base = OTHER; note = DNA nucleotide carrying a 6-amino-5-nitro-3-yl-2(1H)-pyridone nucleobase
  modified_base 11: mod_base = OTHER; note = DNA nucleotide carrying a hypoxanthine nucleobase
  modified_base order(1..2,6,8,13..16,30): mod_base = OTHER; note = 2-Prime-Fluoro modified nucleoside
  modified_base order(3..5,7,12,17..29,31..32): mod_base = OTHER; note = 2-Prime-O-Methyl modified nucleoside
  modified_base order(1^2,31^32): mod_base = OTHER; note = (1,3-dimethylimidazolidin-2-ylidene) Phosphoramidate linkage
  modified_base order(2..11,12..31): mod_base = OTHER; note = Phosphorothioate linkage
  modified_base 11^12: mod_base = OTHER; note = Methylphosphonate linkage
  misc_feature 1..32: note = RM109641

SEQ ID NO: 867 - DNA, 23 bp, synthetic construct
  source 1..23: mol_type = other DNA
  misc_feature 12..13: note = DNA
  misc_feature order(1..11,14..23): note = RNA
  modified_base 11: mod_base = OTHER; note = 2-Prime-O-Methoxyethyl modified 5-methyl Cytidine
  modified_base 12: mod_base = OTHER; note = DNA nucleotide carrying a 6-amino-5-nitro-3-yl-2(1H)-pyridone nucleobase
  modified_base 13: mod_base = OTHER; note = DNA nucleotide carrying a hypoxanthine nucleobase
  modified_base order(10,15..16,18,22..23): mod_base = OTHER; note = 2-Prime-Fluoro modified nucleoside
  modified_base order(1..9,14,17,19..21): mod_base = OTHER; note = 2-Prime-O-Methyl modified nucleoside
  modified_base order(1^2,22^23): mod_base = OTHER; note = (1,3-dimethylimidazolidin-2-ylidene) Phosphoramidate linkage
  modified_base order(2..13,14..22): mod_base = OTHER; note = Phosphorothioate linkage
  modified_base 13^14: mod_base = OTHER; note = Methylphosphonate linkage
  misc_feature 1..23: note = RM109642
tgatgccatacnntgccaccagg

SEQ ID NO: 868 - DNA, 23 bp, synthetic construct
  source 1..23: mol_type = other DNA
  misc_feature 9..10: note = DNA
  misc_feature order(1..8,11..23): note = RNA
  modified_base 8: mod_base = OTHER; note = 2-Prime-O-Methoxyethyl modified 5-methyl Cytidine
  modified_base 9: mod_base = OTHER; note = DNA nucleotide carrying a 6-amino-5-nitro-3-yl-2(1H)-pyridone nucleobase
  modified_base 10: mod_base = OTHER; note = DNA nucleotide carrying a hypoxanthine nucleobase
  modified_base order(7,12..13,15,19..20): mod_base = OTHER; note = 2-Prime-Fluoro modified nucleoside
  modified_base order(1..6,11,14,16..18,21..23): mod_base = OTHER; note = 2-Prime-O-Methyl modified nucleoside
  modified_base order(1^2,22^23): mod_base = OTHER; note = (1,3-dimethylimidazolidin-2-ylidene) Phosphoramidate linkage
  modified_base order(2..10,11..22): mod_base = OTHER; note = Phosphorothioate linkage
  modified_base 10^11: mod_base = OTHER; note = Methylphosphonate linkage
  misc_feature 1..23: note = RM109643
tgccatacnntgccaccagggcg

SEQ ID NO: 869 - DNA, 23 bp, synthetic construct
  source 1..23: mol_type = other DNA
  misc_feature 6..7: note = DNA
  misc_feature order(1..5,8..23): note = RNA
  modified_base 5: mod_base = OTHER; note = 2-Prime-O-Methoxyethyl modified 5-methyl Cytidine
  modified_base 6: mod_base = OTHER; note = DNA nucleotide carrying a 6-amino-5-nitro-3-yl-2(1H)-pyridone nucleobase
  modified_base 7: mod_base = OTHER; note = DNA nucleotide carrying a hypoxanthine nucleobase
  modified_base order(4,9..10,12,16..17): mod_base = OTHER; note = 2-Prime-Fluoro modified nucleoside
  modified_base order(1..3,8,11,13..15,18..23): mod_base = OTHER; note = 2-Prime-O-Methyl modified nucleoside
  modified_base order(1^2,22^23): mod_base = OTHER; note = (1,3-dimethylimidazolidin-2-ylidene) Phosphoramidate linkage
  modified_base order(2..7,8..22): mod_base = OTHER; note = Phosphorothioate linkage
  modified_base 7^8: mod_base = OTHER; note = Methylphosphonate linkage
  misc_feature 1..23: note = RM109644
catacnntgccaccagggcgatg

SEQ ID NO: 870 - DNA, 32 bp, synthetic construct; identical to SEQ ID NO: 5
  source 1..32: mol_type = other DNA
  misc_feature 19..20: note = DNA
  misc_feature order(1..18,21..32): note = RNA
  modified_base 18: mod_base = OTHER; note = 2-Prime-O-Methoxyethyl modified 5-methyl Cytidine
  modified_base 19: mod_base = OTHER; note = DNA nucleotide carrying a 6-amino-5-nitro-3-yl-2(1H)-pyridone nucleobase
  modified_base 20: mod_base = OTHER; note = DNA nucleotide carrying a hypoxanthine nucleobase
  modified_base order(17,22..23,25,29..30): mod_base = OTHER; note = 2-Prime-Fluoro modified nucleoside
  modified_base order(1..16,21,24,26..28,31..32): mod_base = OTHER; note = 2-Prime-O-Methyl modified nucleoside
  modified_base order(1^2,31^32): mod_base = OTHER; note = (1,3-dimethylimidazolidin-2-ylidene) Phosphoramidate linkage
  modified_base order(2..20,21..31): mod_base = OTHER; note = Phosphorothioate linkage
  modified_base 20^21: mod_base = OTHER; note = Methylphosphonate linkage
  misc_feature 1..32: note = RM109645

SEQ ID NO: 871 - DNA, 32 bp, synthetic construct; identical to SEQ ID NO: 189
  source 1..32: mol_type = other DNA
  misc_feature 16..17: note = DNA
  misc_feature order(1..15,18..32): note = RNA
  modified_base 15: mod_base = OTHER; note = 2-Prime-O-Methoxyethyl modified 5-methyl Cytidine
  modified_base 16: mod_base = OTHER; note = DNA nucleotide carrying a 6-amino-5-nitro-3-yl-2(1H)-pyridone nucleobase
  modified_base 17: mod_base = OTHER; note = DNA nucleotide carrying a hypoxanthine nucleobase
  modified_base order(14,19..20,22,26..27): mod_base = OTHER; note = 2-Prime-Fluoro modified nucleoside
  modified_base order(1..13,18,21,23..25,28..32): mod_base = OTHER; note = 2-Prime-O-Methyl modified nucleoside
  modified_base order(1^2,31^32): mod_base = OTHER; note = (1,3-dimethylimidazolidin-2-ylidene) Phosphoramidate linkage
  modified_base order(2..17,18..31): mod_base = OTHER; note = Phosphorothioate linkage
  modified_base 17^18: mod_base = OTHER; note = Methylphosphonate linkage
  misc_feature 1..32: note = RM109646

SEQ ID NO: 872 - DNA, 32 bp, synthetic construct; identical to SEQ ID NO: 190
  source 1..32: mol_type = other DNA
  misc_feature 13..14: note = DNA
  misc_feature order(1..12,15..32): note = RNA
  modified_base 12: mod_base = OTHER; note = 2-Prime-O-Methoxyethyl modified 5-methyl Cytidine
  modified_base 13: mod_base = OTHER; note = DNA nucleotide carrying a 6-amino-5-nitro-3-yl-2(1H)-pyridone nucleobase
  modified_base 14: mod_base = OTHER; note = DNA nucleotide carrying a hypoxanthine nucleobase
  modified_base order(11,16..17,19,23..24): mod_base = OTHER; note = 2-Prime-Fluoro modified nucleoside
  modified_base order(1..10,15,18,20..22,25..32): mod_base = OTHER; note = 2-Prime-O-Methyl modified nucleoside
  modified_base order(1^2,31^32): mod_base = OTHER; note = (1,3-dimethylimidazolidin-2-ylidene) Phosphoramidate linkage
  modified_base order(2..14,15..31): mod_base = OTHER; note = Phosphorothioate linkage
  modified_base 14^15: mod_base = OTHER; note = Methylphosphonate linkage
  misc_feature 1..32: note = RM109647

SEQ ID NO: 873 - DNA, 32 bp, synthetic construct; identical to SEQ ID NO: 191
  source 1..32: mol_type = other DNA
  misc_feature 10..11: note = DNA
  misc_feature order(1..9,12..32): note = RNA
  modified_base 9: mod_base = OTHER; note = 2-Prime-O-Methoxyethyl modified 5-methyl Cytidine
  modified_base 10: mod_base = OTHER; note = DNA nucleotide carrying a 6-amino-5-nitro-3-yl-2(1H)-pyridone nucleobase
  modified_base 11: mod_base = OTHER; note = DNA nucleotide carrying a hypoxanthine nucleobase
  modified_base order(8,13..14,16,20..21): mod_base = OTHER; note = 2-Prime-Fluoro modified nucleoside
  modified_base order(1..7,12,15,17..19,22..32): mod_base = OTHER; note = 2-Prime-O-Methyl modified nucleoside
  modified_base order(1^2,31^32): mod_base = OTHER; note = (1,3-dimethylimidazolidin-2-ylidene) Phosphoramidate linkage
  modified_base order(2..11,12..31): mod_base = OTHER; note = Phosphorothioate linkage
  modified_base 11^12: mod_base = OTHER; note = Methylphosphonate linkage
  misc_feature 1..32: note = RM109648

SEQ ID NO: 874 - DNA, 32 bp, synthetic construct; identical to SEQ ID NO: 192
  source 1..32: mol_type = other DNA
  misc_feature 7..8: note = DNA
  misc_feature order(1..6,9..32): note = RNA
  modified_base 6: mod_base = OTHER; note = 2-Prime-O-Methoxyethyl modified 5-methyl Cytidine
  modified_base 7: mod_base = OTHER; note = DNA nucleotide carrying a 6-amino-5-nitro-3-yl-2(1H)-pyridone nucleobase
  modified_base 8: mod_base = OTHER; note = DNA nucleotide carrying a hypoxanthine nucleobase
  modified_base order(5,10..11,13,17..18): mod_base = OTHER; note = 2-Prime-Fluoro modified nucleoside
  modified_base order(1..4,9,12,14..16,19..32): mod_base = OTHER; note = 2-Prime-O-Methyl modified nucleoside
  modified_base order(1^2,31^32): mod_base = OTHER; note = (1,3-dimethylimidazolidin-2-ylidene) Phosphoramidate linkage
  modified_base order(2..8,9..31): mod_base = OTHER; note = Phosphorothioate linkage
  modified_base 8^9: mod_base = OTHER; note = Methylphosphonate linkage
  misc_feature 1..32: note = RM109649

SEQ ID NO: 875 - DNA, 23 bp, synthetic construct
  source 1..23: mol_type = other DNA
  misc_feature 18..19: note = DNA
  misc_feature order(1..17,20..23): note = RNA
  modified_base 17: mod_base = OTHER; note = 2-Prime-O-Methoxyethyl modified 5-methyl Cytidine
  modified_base 18: mod_base = OTHER; note = DNA nucleotide carrying a 6-amino-5-nitro-3-yl-2(1H)-pyridone nucleobase
  modified_base 19: mod_base = OTHER; note = DNA nucleotide carrying a hypoxanthine nucleobase
  modified_base order(9..10,14,16,21..22): mod_base = OTHER; note = 2-Prime-Fluoro modified nucleoside
  modified_base order(1..8,11..13,15,20,23): mod_base = OTHER; note = 2-Prime-O-Methyl modified nucleoside
  modified_base order(1^2,22^23): mod_base = OTHER; note = (1,3-dimethylimidazolidin-2-ylidene) Phosphoramidate linkage
  modified_base order(2..19,20..22): mod_base = OTHER; note = Phosphorothioate linkage
  modified_base 19^20: mod_base = OTHER; note = Methylphosphonate linkage
  misc_feature 1..23: note = RM109650
ggggcatgatgccatacnntgcc

SEQ ID NO: 876 - DNA, 23 bp, synthetic construct
  source 1..23: mol_type = other DNA
  misc_feature 15..16: note = DNA
  misc_feature order(1..14,17..23): note = RNA
  modified_base 14: mod_base = OTHER; note = 2-Prime-O-Methoxyethyl modified 5-methyl Cytidine
  modified_base 15: mod_base = OTHER; note = DNA nucleotide carrying a 6-amino-5-nitro-3-yl-2(1H)-pyridone nucleobase
  modified_base 16: mod_base = OTHER; note = DNA nucleotide carrying a hypoxanthine nucleobase
  modified_base order(6..7,11,13,18..19): mod_base = OTHER; note = 2-Prime-Fluoro modified nucleoside
  modified_base order(1..5,8..10,12,17,20..23): mod_base = OTHER; note = 2-Prime-O-Methyl modified nucleoside
  modified_base order(1^2,22^23): mod_base = OTHER; note = (1,3-dimethylimidazolidin-2-ylidene) Phosphoramidate linkage
  modified_base order(2..16,17..22): mod_base = OTHER; note = Phosphorothioate linkage
  modified_base 16^17: mod_base = OTHER; note = Methylphosphonate linkage
  misc_feature 1..23: note = RM109651
gcatgatgccatacnntgccacc

SEQ ID NO: 877 - DNA, 23 bp, synthetic construct
  source 1..23: mol_type = other DNA
  misc_feature 12..13: note = DNA
  misc_feature order(1..11,14..23): note = RNA
  modified_base 11: mod_base = OTHER; note = 2-Prime-O-Methoxyethyl modified 5-methyl Cytidine
  modified_base 12: mod_base = OTHER; note = DNA nucleotide carrying a 6-amino-5-nitro-3-yl-2(1H)-pyridone nucleobase
  modified_base 13: mod_base = OTHER; note = DNA nucleotide carrying a hypoxanthine nucleobase
  modified_base order(3..4,8,10,15..16): mod_base = OTHER; note = 2-Prime-Fluoro modified nucleoside
  modified_base order(1..2,5..7,9,14,17..23): mod_base = OTHER; note = 2-Prime-O-Methyl modified nucleoside
  modified_base order(1^2,22^23): mod_base = OTHER; note = (1,3-dimethylimidazolidin-2-ylidene) Phosphoramidate linkage
  modified_base order(2..13,14..22): mod_base = OTHER; note = Phosphorothioate linkage
  modified_base 13^14: mod_base = OTHER; note = Methylphosphonate linkage
  misc_feature 1..23: note = RM109652
tgatgccatacnntgccaccagg

SEQ ID NO: 878 - DNA, 32 bp, synthetic construct; identical to SEQ ID NO: 185
  source 1..32: mol_type = other DNA
  misc_feature 28..29: note = DNA
  misc_feature order(1..27,30..32): note = RNA
  modified_base 27: mod_base = OTHER; note = 2-Prime-O-Methoxyethyl modified 5-methyl Cytidine
  modified_base 28: mod_base = OTHER; note = DNA nucleotide carrying a 6-amino-5-nitro-3-yl-2(1H)-pyridone nucleobase
  modified_base 29: mod_base = OTHER; note = DNA nucleotide carrying a hypoxanthine nucleobase
  modified_base order(19..20,24,26,31..32): mod_base = OTHER; note = 2-Prime-Fluoro modified nucleoside
  modified_base order(1..18,21..23,25,30): mod_base = OTHER; note = 2-Prime-O-Methyl modified nucleoside
  modified_base order(1^2,31^32): mod_base = OTHER; note = (1,3-dimethylimidazolidin-2-ylidene) Phosphoramidate linkage
  modified_base order(2..29,30^31): mod_base = OTHER; note = Phosphorothioate linkage
  modified_base 29^30: mod_base = OTHER; note = Methylphosphonate linkage
  misc_feature 1..32: note = RM109653

SEQ ID NO: 879 - DNA, 32 bp, synthetic construct; identical to SEQ ID NO: 186
  source 1..32: mol_type = other DNA
  misc_feature 25..26: note = DNA
  misc_feature order(1..24,27..32): note = RNA
  modified_base 24: mod_base = OTHER; note = 2-Prime-O-Methoxyethyl modified 5-methyl Cytidine
  modified_base 25: mod_base = OTHER; note = DNA nucleotide carrying a 6-amino-5-nitro-3-yl-2(1H)-pyridone nucleobase
  modified_base 26: mod_base = OTHER; note = DNA nucleotide carrying a hypoxanthine nucleobase
  modified_base order(16..17,21,23,28..29): mod_base = OTHER; note = 2-Prime-Fluoro modified nucleoside
  modified_base order(1..15,18..20,22,27,30..32): mod_base = OTHER; note = 2-Prime-O-Methyl modified nucleoside
  modified_base order(1^2,31^32): mod_base = OTHER; note = (1,3-dimethylimidazolidin-2-ylidene) Phosphoramidate linkage
  modified_base order(2..26,27..31): mod_base = OTHER; note = Phosphorothioate linkage
  modified_base 26^27: mod_base = OTHER; note = Methylphosphonate linkage
  misc_feature 1..32: note = RM109654

SEQ ID NO: 880 - DNA, 32 bp, synthetic construct; identical to SEQ ID NO: 187
  source 1..32: mol_type = other DNA
  misc_feature 22..23: note = DNA
  misc_feature order(1..21,24..32): note = RNA
  modified_base 21: mod_base = OTHER; note = 2-Prime-O-Methoxyethyl modified 5-methyl Cytidine
  modified_base 22: mod_base = OTHER; note = DNA nucleotide carrying a 6-amino-5-nitro-3-yl-2(1H)-pyridone nucleobase
  modified_base 23: mod_base = OTHER; note = DNA nucleotide carrying a hypoxanthine nucleobase
  modified_base order(13..14,18,20,25..26): mod_base = OTHER; note = 2-Prime-Fluoro modified nucleoside
  modified_base order(1..12,15..17,19,24,27..32): mod_base = OTHER; note = 2-Prime-O-Methyl modified nucleoside
  modified_base order(1^2,31^32): mod_base = OTHER; note = (1,3-dimethylimidazolidin-2-ylidene) Phosphoramidate linkage
  modified_base order(2..23,24..31): mod_base = OTHER; note = Phosphorothioate linkage
  modified_base 23^24: mod_base = OTHER; note = Methylphosphonate linkage
  misc_feature 1..32: note = RM109655

SEQ ID NO: 881 - DNA, 32 bp, synthetic construct; identical to SEQ ID NO: 5
  source 1..32: mol_type = other DNA
  misc_feature 19..20: note = DNA
  misc_feature order(1..18,21..32): note = RNA
  modified_base 18: mod_base = OTHER; note = 2-Prime-O-Methoxyethyl modified 5-methyl Cytidine
  modified_base 19: mod_base = OTHER; note = DNA nucleotide carrying a 6-amino-5-nitro-3-yl-2(1H)-pyridone nucleobase
  modified_base 20: mod_base = OTHER; note = DNA nucleotide carrying a hypoxanthine nucleobase
  modified_base order(10..11,15,17,22..23): mod_base = OTHER; note = 2-Prime-Fluoro modified nucleoside
  modified_base order(1..9,12..14,16,21,24..32): mod_base = OTHER; note = 2-Prime-O-Methyl modified nucleoside
  modified_base order(1^2,31^32): mod_base = OTHER; note = (1,3-dimethylimidazolidin-2-ylidene) Phosphoramidate linkage
  modified_base order(2..20,21..31): mod_base = OTHER; note = Phosphorothioate linkage
  modified_base 20^21: mod_base = OTHER; note = Methylphosphonate linkage
  misc_feature 1..32: note = RM109656

SEQ ID NO: 882 - DNA, 32 bp, synthetic construct; identical to SEQ ID NO: 189
  source 1..32: mol_type = other DNA
  misc_feature 16..17: note = DNA
  misc_feature order(1..15,18..32): note = RNA
  modified_base 15: mod_base = OTHER; note = 2-Prime-O-Methoxyethyl modified 5-methyl Cytidine
  modified_base 16: mod_base = OTHER; note = DNA nucleotide carrying a 6-amino-5-nitro-3-yl-2(1H)-pyridone nucleobase
  modified_base 17: mod_base = OTHER; note = DNA nucleotide carrying a hypoxanthine nucleobase
  modified_base order(7..8,12,14,19..20): mod_base = OTHER; note = 2-Prime-Fluoro modified nucleoside
  modified_base order(1..6,9..11,13,18,21..32): mod_base = OTHER; note = 2-Prime-O-Methyl modified nucleoside
  modified_base order(1^2,31^32): mod_base = OTHER; note = (1,3-dimethylimidazolidin-2-ylidene) Phosphoramidate linkage
  modified_base order(2..17,18..31): mod_base = OTHER; note = Phosphorothioate linkage
  modified_base 17^18: mod_base = OTHER; note = Methylphosphonate linkage
  misc_feature 1..32: note = RM109657

SEQ ID NO: 883 - DNA, 32 bp, synthetic construct; identical to SEQ ID NO: 190
  source 1..32: mol_type = other DNA
  misc_feature 13..14: note = DNA
  misc_feature order(1..12,15..32): note = RNA
  modified_base 12: mod_base = OTHER; note = 2-Prime-O-Methoxyethyl modified 5-methyl Cytidine
  modified_base 13: mod_base = OTHER; note = DNA nucleotide carrying a 6-amino-5-nitro-3-yl-2(1H)-pyridone nucleobase
  modified_base 14: mod_base = OTHER; note = DNA nucleotide carrying a hypoxanthine nucleobase
  modified_base order(4..5,9,11,16..17): mod_base = OTHER; note = 2-Prime-Fluoro modified nucleoside
  modified_base order(1..3,6..8,10,15,18..32): mod_base = OTHER; note = 2-Prime-O-Methyl modified nucleoside
  modified_base order(1^2,31^32): mod_base = OTHER; note = (1,3-dimethylimidazolidin-2-ylidene) Phosphoramidate linkage
  modified_base order(2..14,15..31): mod_base = OTHER; note = Phosphorothioate linkage
  modified_base 14^15: mod_base = OTHER; note = Methylphosphonate linkage
  misc_feature 1..32: note = RM109658

SEQ ID NO: 884 - DNA, 32 bp, synthetic construct; identical to SEQ ID NO: 191
  source 1..32: mol_type = other DNA
  misc_feature 10..11: note = DNA
  misc_feature order(1..9,12..32): note = RNA
  modified_base 9: mod_base = OTHER; note = 2-Prime-O-Methoxyethyl modified 5-methyl Cytidine
  modified_base 10: mod_base = OTHER; note = DNA nucleotide carrying a 6-amino-5-nitro-3-yl-2(1H)-pyridone nucleobase
  modified_base 11: mod_base = OTHER; note = DNA nucleotide carrying a hypoxanthine nucleobase
  modified_base order(1..2,6,8,13..14): mod_base = OTHER; note = 2-Prime-Fluoro modified nucleoside
  modified_base order(3..5,7,12,15..32): mod_base = OTHER; note = 2-Prime-O-Methyl modified nucleoside
  modified_base order(1^2,31^32): mod_base = OTHER; note = (1,3-dimethylimidazolidin-2-ylidene) Phosphoramidate linkage
  modified_base order(2..11,12..31): mod_base = OTHER; note = Phosphorothioate linkage
  modified_base 11^12: mod_base = OTHER; note = Methylphosphonate linkage
  misc_feature 1..32: note = RM109659

SEQ ID NO: 885 - DNA, 32 bp, synthetic construct; identical to SEQ ID NO: 185
  source 1..32: mol_type = other DNA
  misc_feature 28..29: note = DNA
  misc_feature order(1..27,30..32): note = RNA
  modified_base 27: mod_base = OTHER; note = 2-Prime-O-Methoxyethyl modified 5-methyl Cytidine
  modified_base 28: mod_base = OTHER; note = DNA nucleotide carrying a 6-amino-5-nitro-3-yl-2(1H)-pyridone nucleobase
  modified_base 29: mod_base = OTHER; note = DNA nucleotide carrying a hypoxanthine nucleobase
  modified_base order(26,31..32): mod_base = OTHER; note = 2-Prime-Fluoro modified nucleoside
  modified_base order(1..25,30): mod_base = OTHER; note = 2-Prime-O-Methyl modified nucleoside
  modified_base order(1^2,31^32): mod_base = OTHER; note = (1,3-dimethylimidazolidin-2-ylidene) Phosphoramidate linkage
  modified_base order(2..29,30^31): mod_base = OTHER; note = Phosphorothioate linkage
  modified_base 29^30: mod_base = OTHER; note = Methylphosphonate linkage
  misc_feature 1..32: note = RM109660

SEQ ID NO: 886 - DNA, 32 bp, synthetic construct; identical to SEQ ID NO: 186
  source 1..32: mol_type = other DNA
  misc_feature 25..26: note = DNA
  misc_feature order(1..24,27..32): note = RNA
  modified_base 24: mod_base = OTHER; note = 2-Prime-O-Methoxyethyl modified 5-methyl Cytidine
  modified_base 25: mod_base = OTHER; note = DNA nucleotide carrying a 6-amino-5-nitro-3-yl-2(1H)-pyridone nucleobase
  modified_base 26: mod_base = OTHER; note = DNA nucleotide carrying a hypoxanthine nucleobase
  modified_base order(23,28..29): mod_base = OTHER; note = 2-Prime-Fluoro modified nucleoside
  modified_base order(1..22,27,30..32): mod_base = OTHER; note = 2-Prime-O-Methyl modified nucleoside
  modified_base order(1^2,31^32): mod_base = OTHER; note = (1,3-dimethylimidazolidin-2-ylidene) Phosphoramidate linkage
  modified_base order(2..26,27..31): mod_base = OTHER; note = Phosphorothioate linkage
  modified_base 26^27: mod_base = OTHER; note = Methylphosphonate linkage
  misc_feature 1..32: note = RM109661

SEQ ID NO: 887 - DNA, 32 bp, synthetic construct; identical to SEQ ID NO: 187
  source 1..32: mol_type = other DNA
  misc_feature 22..23: note = DNA
  misc_feature order(1..21,24..32): note = RNA
  modified_base 21: mod_base = OTHER; note = 2-Prime-O-Methoxyethyl modified 5-methyl Cytidine
  modified_base 22: mod_base = OTHER; note = DNA nucleotide carrying a 6-amino-5-nitro-3-yl-2(1H)-pyridone nucleobase
  modified_base 23: mod_base = OTHER; note = DNA nucleotide carrying a hypoxanthine nucleobase
  modified_base order(20,25..26): mod_base = OTHER; note = 2-Prime-Fluoro modified nucleoside
  modified_base order(1..19,24,27..32): mod_base = OTHER; note = 2-Prime-O-Methyl modified nucleoside
  modified_base order(1^2,31^32): mod_base = OTHER; note = (1,3-dimethylimidazolidin-2-ylidene) Phosphoramidate linkage
  modified_base order(2..23,24..31): mod_base = OTHER; note = Phosphorothioate linkage
  modified_base 23^24: mod_base = OTHER; note = Methylphosphonate linkage
  misc_feature 1..32: note = RM109662

SEQ ID NO: 888 - DNA, 32 bp, synthetic construct; identical to SEQ ID NO: 5
  source 1..32: mol_type = other DNA
  misc_feature 19..20: note = DNA
  misc_feature order(1..18,21..32): note = RNA
  modified_base 18: mod_base = OTHER; note = 2-Prime-O-Methoxyethyl modified 5-methyl Cytidine
  modified_base 19: mod_base = OTHER; note = DNA nucleotide carrying a 6-amino-5-nitro-3-yl-2(1H)-pyridone nucleobase
  modified_base 20: mod_base = OTHER; note = DNA nucleotide carrying a hypoxanthine nucleobase
  modified_base order(17,22..23): mod_base = OTHER; note = 2-Prime-Fluoro modified nucleoside
  modified_base order(1..16,21,24..32): mod_base = OTHER; note = 2-Prime-O-Methyl modified nucleoside
  modified_base order(1^2,31^32): mod_base = OTHER; note = (1,3-dimethylimidazolidin-2-ylidene) Phosphoramidate linkage
  modified_base order(2..20,21..31): mod_base = OTHER; note = Phosphorothioate linkage
  modified_base 20^21: mod_base = OTHER; note = Methylphosphonate linkage
  misc_feature 1..32: note = RM109663

SEQ ID NO: 889 - DNA, 32 bp, synthetic construct; identical to SEQ ID NO: 189
  source 1..32: mol_type = other DNA
  misc_feature 16..17: note = DNA
  misc_feature order(1..15,18..32): note = RNA
  modified_base 15: mod_base = OTHER; note = 2-Prime-O-Methoxyethyl modified 5-methyl Cytidine
  modified_base 16: mod_base = OTHER; note = DNA nucleotide carrying a 6-amino-5-nitro-3-yl-2(1H)-pyridone nucleobase
  modified_base 17: mod_base = OTHER; note = DNA nucleotide carrying a hypoxanthine nucleobase
  modified_base order(14,19..20): mod_base = OTHER; note = 2-Prime-Fluoro modified nucleoside
  modified_base order(1..13,18,21..32): mod_base = OTHER; note = 2-Prime-O-Methyl modified nucleoside
  modified_base order(1^2,31^32): mod_base = OTHER; note = (1,3-dimethylimidazolidin-2-ylidene) Phosphoramidate linkage
  modified_base order(2..17,18..31): mod_base = OTHER; note = Phosphorothioate linkage
  modified_base 17^18: mod_base = OTHER; note = Methylphosphonate linkage
  misc_feature 1..32: note = RM109664

SEQ ID NO: 890 - DNA, 32 bp, synthetic construct; identical to SEQ ID NO: 190
  source 1..32: mol_type = other DNA
  misc_feature 13..14: note = DNA
  misc_feature order(1..12,15..32): note = RNA
  modified_base 12: mod_base = OTHER; note = 2-Prime-O-Methoxyethyl modified 5-methyl Cytidine
  modified_base 13: mod_base = OTHER; note = DNA nucleotide carrying a 6-amino-5-nitro-3-yl-2(1H)-pyridone nucleobase
  modified_base 14: mod_base = OTHER; note = DNA nucleotide carrying a hypoxanthine nucleobase
  modified_base order(11,16..17): mod_base = OTHER; note = 2-Prime-Fluoro modified nucleoside
  modified_base order(1..10,15,18..32): mod_base = OTHER; note = 2-Prime-O-Methyl modified nucleoside
  modified_base order(1^2,31^32): mod_base = OTHER; note = (1,3-dimethylimidazolidin-2-ylidene) Phosphoramidate linkage
  modified_base order(2..14,15..31): mod_base = OTHER; note = Phosphorothioate linkage
  modified_base 14^15: mod_base = OTHER; note = Methylphosphonate linkage
  misc_feature 1..32: note = RM109665

SEQ ID NO: 891 - DNA, 32 bp, synthetic construct; identical to SEQ ID NO: 191
  source 1..32: mol_type = other DNA
  misc_feature 10..11: note = DNA
  misc_feature order(1..9,12..32): note = RNA
  modified_base 9: mod_base = OTHER; note = 2-Prime-O-Methoxyethyl modified 5-methyl Cytidine
  modified_base 10: mod_base = OTHER; note = DNA nucleotide carrying a 6-amino-5-nitro-3-yl-2(1H)-pyridone nucleobase
  modified_base 11: mod_base = OTHER; note = DNA nucleotide carrying a hypoxanthine nucleobase
  modified_base order(8,13..14): mod_base = OTHER; note = 2-Prime-Fluoro modified nucleoside
  modified_base order(1..7,12,15..32): mod_base = OTHER; note = 2-Prime-O-Methyl modified nucleoside
  modified_base order(1^2,31^32): mod_base = OTHER; note = (1,3-dimethylimidazolidin-2-ylidene) Phosphoramidate linkage
  modified_base order(2..11,12..31): mod_base = OTHER; note = Phosphorothioate linkage
  modified_base 11^12: mod_base = OTHER; note = Methylphosphonate linkage
  misc_feature 1..32: note = RM109666

SEQ ID NO: 892 - DNA, 32 bp, synthetic construct; identical to SEQ ID NO: 192
  source 1..32: mol_type = other DNA
  misc_feature 7..8: note = DNA
  misc_feature order(1..6,9..32): note = RNA
  modified_base 6: mod_base = OTHER; note = 2-Prime-O-Methoxyethyl modified 5-methyl Cytidine
  modified_base 7: mod_base = OTHER; note = DNA nucleotide carrying a 6-amino-5-nitro-3-yl-2(1H)-pyridone nucleobase
  modified_base 8: mod_base = OTHER; note = DNA nucleotide carrying a hypoxanthine nucleobase
  modified_base order(5,10..11): mod_base = OTHER; note = 2-Prime-Fluoro modified nucleoside
  modified_base order(1..4,9,12..32): mod_base = OTHER; note = 2-Prime-O-Methyl modified nucleoside
  modified_base order(1^2,31^32): mod_base = OTHER; note = (1,3-dimethylimidazolidin-2-ylidene) Phosphoramidate linkage
  modified_base order(2..8,9..31): mod_base = OTHER; note = Phosphorothioate linkage
  modified_base 8^9: mod_base = OTHER; note = Methylphosphonate linkage
  misc_feature 1..32: note = RM109667

SEQ ID NO: 893 - DNA, 29 bp, synthetic construct
  source 1..29: mol_type = other DNA
  misc_feature 18..19: note = DNA
  misc_feature order(1..17,20..29): note = RNA
  modified_base 17: mod_base = OTHER; note = 2-Prime-O-Methoxyethyl modified 5-methyl Cytidine
  modified_base 18: mod_base = OTHER; note = DNA nucleotide carrying a 6-amino-5-nitro-3-yl-2(1H)-pyridone nucleobase
  modified_base 19: mod_base = OTHER; note = DNA nucleotide carrying a hypoxanthine nucleobase
  modified_base order(4,6,10,13,21..23,27): mod_base = OTHER; note = 2-Prime-Fluoro modified nucleoside
  modified_base order(1..3,5,7..9,11..12,14..16,20,24..26,28..29): mod_base = OTHER; note = 2-Prime-O-Methyl modified nucleoside
  modified_base order(1^2,28^29): mod_base = OTHER; note = (1,3-dimethylimidazolidin-2-ylidene) Phosphoramidate linkage
  modified_base order(2..19,20..28): mod_base = OTHER; note = Phosphorothioate linkage
  modified_base 19^20: mod_base = OTHER; note = Methylphosphonate linkage
  misc_feature 1..29: note = RM109668
ggggcatgatgccatacnntgccaccagg

SEQ ID NO: 894 - DNA, 29 bp, synthetic construct
  source 1..29: mol_type = other DNA
  misc_feature 15..16: note = DNA
  misc_feature order(1..14,17..29): note = RNA
  modified_base 14: mod_base = OTHER; note = 2-Prime-O-Methoxyethyl modified 5-methyl Cytidine
  modified_base 15: mod_base = OTHER; note = DNA nucleotide carrying a 6-amino-5-nitro-3-yl-2(1H)-pyridone nucleobase
  modified_base 16: mod_base = OTHER; note = DNA nucleotide carrying a hypoxanthine nucleobase
  modified_base order(1,3,7,10,18..20,24): mod_base = OTHER; note = 2-Prime-Fluoro modified nucleoside
  modified_base order(2,4..6,8..9,11..13,17,21..23,25..29): mod_base = OTHER; note = 2-Prime-O-Methyl modified nucleoside
  modified_base order(1^2,28^29): mod_base = OTHER; note = (1,3-dimethylimidazolidin-2-ylidene) Phosphoramidate linkage
  modified_base order(2..16,17..28): mod_base = OTHER; note = Phosphorothioate linkage
  modified_base 16^17: mod_base = OTHER; note = Methylphosphonate linkage
  misc_feature 1..29: note = RM109669
gcatgatgccatacnntgccaccagggcg

SEQ ID NO: 895 - DNA, 29 bp, synthetic construct
  source 1..29: mol_type = other DNA
  misc_feature 12..13: note = DNA
  misc_feature order(1..11,14..29): note = RNA
  modified_base 11: mod_base = OTHER; note = 2-Prime-O-Methoxyethyl modified 5-methyl Cytidine
  modified_base 12: mod_base = OTHER; note = DNA nucleotide carrying a 6-amino-5-nitro-3-yl-2(1H)-pyridone nucleobase
  modified_base 13: mod_base = OTHER; note = DNA nucleotide carrying a hypoxanthine nucleobase
  modified_base order(5,9..10,15,19,22,26,28): mod_base = OTHER; note = 2-Prime-Fluoro modified nucleoside
  modified_base order(1..4,6..8,14,16..18,20..21,23..25,27,29): mod_base = OTHER; note = 2-Prime-O-Methyl modified nucleoside
  modified_base order(1^2,28^29): mod_base = OTHER; note = (1,3-dimethylimidazolidin-2-ylidene) Phosphoramidate linkage
  modified_base order(2..13,14..28): mod_base = OTHER; note = Phosphorothioate linkage
  modified_base 13^14: mod_base = OTHER; note = Methylphosphonate linkage
  misc_feature 1..29: note = RM109670
tgatgccatacnntgccaccagggcgatg

SEQ ID NO: 896 - DNA, 29 bp, synthetic construct
  source 1..29: mol_type = other DNA
  misc_feature 9..10: note = DNA
  misc_feature order(1..8,11..29): note = RNA
  modified_base 8: mod_base = OTHER; note = 2-Prime-O-Methoxyethyl modified 5-methyl Cytidine
  modified_base 9: mod_base = OTHER; note = DNA nucleotide carrying a 6-amino-5-nitro-3-yl-2(1H)-pyridone nucleobase
  modified_base 10: mod_base = OTHER; note = DNA nucleotide carrying a hypoxanthine nucleobase
  modified_base order(2,6..7,12,16,19,23,25): mod_base = OTHER; note = 2-Prime-Fluoro modified nucleoside
  modified_base order(1,3..5,11,13..15,17..18,20..22,24,26..29): mod_base = OTHER; note = 2-Prime-O-Methyl modified nucleoside
  modified_base order(1^2,28^29): mod_base = OTHER; note = (1,3-dimethylimidazolidin-2-ylidene) Phosphoramidate linkage
  modified_base order(2..10,11..28): mod_base = OTHER; note = Phosphorothioate linkage
  modified_base 10^11: mod_base = OTHER; note = Methylphosphonate linkage
  misc_feature 1..29: note = RM109671
tgccatacnntgccaccagggcgatggcc

SEQ ID NO: 897 - DNA, 26 bp, synthetic construct
  source 1..26: mol_type = other DNA
  misc_feature 19..20: note = DNA
  misc_feature order(1..18,21..26): note = RNA
  modified_base 18: mod_base = OTHER; note = 2-Prime-O-Methoxyethyl modified 5-methyl Cytidine
  modified_base 19: mod_base = OTHER; note = DNA nucleotide carrying a 6-amino-5-nitro-3-yl-2(1H)-pyridone nucleobase
  modified_base 20: mod_base = OTHER; note = DNA nucleotide carrying a hypoxanthine nucleobase
  modified_base order(11,14,22..24): mod_base = OTHER; note = 2-Prime-Fluoro modified nucleoside
  modified_base order(1..10,12..13,15..17,21,25..26): mod_base = OTHER; note = 2-Prime-O-Methyl modified nucleoside
  modified_base order(1^2,25^26): mod_base = OTHER; note = (1,3-dimethylimidazolidin-2-ylidene) Phosphoramidate linkage
  modified_base order(2..20,21..25): mod_base = OTHER; note = Phosphorothioate linkage
  modified_base 20^21: mod_base = OTHER; note = Methylphosphonate linkage
  misc_feature 1..26: note = RM109672
aggggcatgatgccatacnntgccac

SEQ ID NO: 898 - DNA, 26 bp, synthetic construct
  source 1..26: mol_type = other DNA
  misc_feature 16..17: note = DNA
  misc_feature order(1..15,18..26): note = RNA
  modified_base 15: mod_base = OTHER; note = 2-Prime-O-Methoxyethyl modified 5-methyl Cytidine
  modified_base 16: mod_base = OTHER; note = DNA nucleotide carrying a 6-amino-5-nitro-3-yl-2(1H)-pyridone nucleobase
  modified_base 17: mod_base = OTHER; note = DNA nucleotide carrying a hypoxanthine nucleobase
  modified_base order(8,11,19..21): mod_base = OTHER; note = 2-Prime-Fluoro modified nucleoside
  modified_base order(1..7,9..10,12..14,18,22..26): mod_base = OTHER; note = 2-Prime-O-Methyl modified nucleoside
  modified_base order(1^2,25^26): mod_base = OTHER; note = (1,3-dimethylimidazolidin-2-ylidene) Phosphoramidate linkage
  modified_base order(2..17,18..25): mod_base = OTHER; note = Phosphorothioate linkage
  modified_base 17^18: mod_base = OTHER; note = Methylphosphonate linkage
  misc_feature 1..26: note = RM109673
ggcatgatgccatacnntgccaccag

SEQ ID NO: 899 - DNA, 26 bp, synthetic construct
  source 1..26: mol_type = other DNA
  misc_feature 13..14: note = DNA
  misc_feature order(1..12,15..26): note = RNA
  modified_base 12: mod_base = OTHER; note = 2-Prime-O-Methoxyethyl modified 5-methyl Cytidine
  modified_base 13: mod_base = OTHER; note = DNA nucleotide carrying a 6-amino-5-nitro-3-yl-2(1H)-pyridone nucleobase
  modified_base 14: mod_base = OTHER; note = DNA nucleotide carrying a hypoxanthine nucleobase
  modified_base order(5,8,16..18): mod_base = OTHER; note = 2-Prime-Fluoro modified nucleoside
  modified_base order(1..4,6..7,9..11,15,19..26): mod_base = OTHER; note = 2-Prime-O-Methyl modified nucleoside
  modified_base order(1^2,25^26): mod_base = OTHER; note = (1,3-dimethylimidazolidin-2-ylidene) Phosphoramidate linkage
  modified_base order(2..14,15..25): mod_base = OTHER; note = Phosphorothioate linkage
  modified_base 14^15: mod_base = OTHER; note = Methylphosphonate linkage
  misc_feature 1..26: note = RM109674
atgatgccatacnntgccaccagggc

SEQ ID NO: 900 - DNA, 26 bp, synthetic construct
  source 1..26: mol_type = other DNA
  misc_feature 10..11: note = DNA
  misc_feature order(1..9,12..26): note = RNA
  modified_base 9: mod_base = OTHER; note = 2-Prime-O-Methoxyethyl modified 5-methyl Cytidine
  modified_base 10: mod_base = OTHER; note = DNA nucleotide carrying a 6-amino-5-nitro-3-yl-2(1H)-pyridone nucleobase
  modified_base 11: mod_base = OTHER; note = DNA nucleotide carrying a hypoxanthine nucleobase
  modified_base order(2,5,13..15): mod_base = OTHER; note = 2-Prime-Fluoro modified nucleoside
  modified_base order(1,3..4,6..8,12,16..26): mod_base = OTHER; note = 2-Prime-O-Methyl modified nucleoside
  modified_base order(1^2,25^26): mod_base = OTHER; note = (1,3-dimethylimidazolidin-2-ylidene) Phosphoramidate linkage
  modified_base order(2..11,12..25): mod_base = OTHER; note = Phosphorothioate linkage
  modified_base 11^12: mod_base = OTHER; note = Methylphosphonate linkage
  misc_feature 1..26: note = RM109675
atgccatacnntgccaccagggcgat

SEQ ID NO: 901 - DNA, 29 bp, synthetic construct
  source 1..29: mol_type = other DNA
  misc_feature 24..25: note = DNA
  misc_feature order(1..23,26..29): note = RNA
  modified_base 23: mod_base = OTHER; note = 2-Prime-O-Methoxyethyl modified 5-methyl Cytidine
  modified_base 24: mod_base = OTHER; note = DNA nucleotide carrying a 6-amino-5-nitro-3-yl-2(1H)-pyridone nucleobase
  modified_base 25: mod_base = OTHER; note = DNA nucleotide carrying a hypoxanthine nucleobase
  modified_base order(16,19,27..29): mod_base = OTHER; note = 2-Prime-Fluoro modified nucleoside
  modified_base order(1..15,17..18,20..22,26): mod_base = OTHER; note = 2-Prime-O-Methyl modified nucleoside
  modified_base order(1^2,28^29): mod_base = OTHER; note = (1,3-dimethylimidazolidin-2-ylidene) Phosphoramidate linkage
  modified_base order(2..25,26..28): mod_base = OTHER; note = Phosphorothioate linkage
  modified_base 25^26: mod_base = OTHER; note = Methylphosphonate linkage
  misc_feature 1..29: note = RM109676
ccgtgaggggcatgatgccatacnntgcc

SEQ ID NO: 902 - DNA, 29 bp, synthetic construct
  source 1..29: mol_type = other DNA
  misc_feature 21..22: note = DNA
  misc_feature order(1..20,23..29): note = RNA
  modified_base 20: mod_base = OTHER; note = 2-Prime-O-Methoxyethyl modified 5-methyl Cytidine
  modified_base 21: mod_base = OTHER; note = DNA nucleotide carrying a 6-amino-5-nitro-3-yl-2(1H)-pyridone nucleobase
  modified_base 22: mod_base = OTHER; note = DNA nucleotide carrying a hypoxanthine nucleobase
  modified_base order(13,16,24..26): mod_base = OTHER; note = 2-Prime-Fluoro modified nucleoside
  modified_base order(1..12,14..15,17..19,23,27..29): mod_base = OTHER; note = 2-Prime-O-Methyl modified nucleoside
  modified_base order(1^2,28^29): mod_base = OTHER; note = (1,3-dimethylimidazolidin-2-ylidene) Phosphoramidate linkage
  modified_base order(2..22,23..28): mod_base = OTHER; note = Phosphorothioate linkage
  modified_base 22^23: mod_base = OTHER; note = Methylphosphonate linkage
  misc_feature 1..29: note = RM109677
tgaggggcatgatgccatacnntgccacc

SEQ ID NO: 903 - DNA, 29 bp, synthetic construct
  source 1..29: mol_type = other DNA
  misc_feature 18..19: note = DNA
  misc_feature order(1..17,20..29): note = RNA
  modified_base 17: mod_base = OTHER; note = 2-Prime-O-Methoxyethyl modified 5-methyl Cytidine
  modified_base 18: mod_base = OTHER; note = DNA nucleotide carrying a 6-amino-5-nitro-3-yl-2(1H)-pyridone nucleobase
  modified_base 19: mod_base = OTHER; note = DNA nucleotide carrying a hypoxanthine nucleobase
  modified_base order(10,13,21..23): mod_base = OTHER; note = 2-Prime-Fluoro modified nucleoside
  modified_base order(1..9,11..12,14..16,20,24..29): mod_base = OTHER; note = 2-Prime-O-Methyl modified nucleoside
  modified_base order(1^2,28^29): mod_base = OTHER; note = (1,3-dimethylimidazolidin-2-ylidene) Phosphoramidate linkage
  modified_base order(2..19,20..28): mod_base = OTHER; note = Phosphorothioate linkage
  modified_base 19^20: mod_base = OTHER; note = Methylphosphonate linkage
  misc_feature 1..29: note = RM109678
ggggcatgatgccatacnntgccaccagg

SEQ ID NO: 904 - DNA, 29 bp, synthetic construct
  source 1..29: mol_type = other DNA
  misc_feature 15..16: note = DNA
  misc_feature order(1..14,17..29): note = RNA
  modified_base 14: mod_base = OTHER; note = 2-Prime-O-Methoxyethyl modified 5-methyl Cytidine
  modified_base 15: mod_base = OTHER; note = DNA nucleotide carrying a 6-amino-5-nitro-3-yl-2(1H)-pyridone nucleobase
  modified_base 16: mod_base = OTHER; note = DNA nucleotide carrying a hypoxanthine nucleobase
  modified_base order(7,10,18..20): mod_base = OTHER; note = 2-Prime-Fluoro modified nucleoside
  modified_base order(1..6,8..9,11..13,17,21..29): mod_base = OTHER; note = 2-Prime-O-Methyl modified nucleoside
  modified_base order(1^2,28^29): mod_base = OTHER; note = (1,3-dimethylimidazolidin-2-ylidene) Phosphoramidate linkage
  modified_base order(2..16,17..28): mod_base = OTHER; note = Phosphorothioate linkage
  modified_base 16^17: mod_base = OTHER; note = Methylphosphonate linkage
  misc_feature 1..29: note = RM109679
gcatgatgccatacnntgccaccagggcg

SEQ ID NO: 905 - DNA, 29 bp, synthetic construct
  source 1..29: mol_type = other DNA
  misc_feature 12..13: note = DNA
  misc_feature order(1..11,14..29): note = RNA
  modified_base 11: mod_base = OTHER; note = 2-Prime-O-Methoxyethyl modified 5-methyl Cytidine
  modified_base 12: mod_base = OTHER; note = DNA nucleotide carrying a 6-amino-5-nitro-3-yl-2(1H)-pyridone nucleobase
  modified_base 13: mod_base = OTHER; note = DNA nucleotide carrying a hypoxanthine nucleobase
  modified_base order(4,7,15..17): mod_base = OTHER; note = 2-Prime-Fluoro modified nucleoside
  modified_base order(1..3,5..6,8..10,14,18..29): mod_base = OTHER; note = 2-Prime-O-Methyl modified nucleoside
  modified_base order(1^2,28^29): mod_base = OTHER; note = (1,3-dimethylimidazolidin-2-ylidene) Phosphoramidate linkage
  modified_base order(2..13,14..28): mod_base = OTHER; note = Phosphorothioate linkage
  modified_base 13^14: mod_base = OTHER; note = Methylphosphonate linkage
  misc_feature 1..29: note = RM109680
tgatgccatacnntgccaccagggcgatg

SEQ ID NO: 906 - DNA, 29 bp, synthetic construct
  source 1..29: mol_type = other DNA
  misc_feature 9..10: note = DNA
  misc_feature order(1..8,11..29): note = RNA
  modified_base 8: mod_base = OTHER; note = 2-Prime-O-Methoxyethyl modified 5-methyl Cytidine
  modified_base 9: mod_base = OTHER; note = DNA nucleotide carrying a 6-amino-5-nitro-3-yl-2(1H)-pyridone nucleobase
  modified_base 10: mod_base = OTHER; note = DNA nucleotide carrying a hypoxanthine nucleobase
  modified_base order(1,4,12..14): mod_base = OTHER; note = 2-Prime-Fluoro modified nucleoside
  modified_base order(2..3,5..7,11,15..29): mod_base = OTHER; note = 2-Prime-O-Methyl modified nucleoside
  modified_base order(1^2,28^29): mod_base = OTHER; note = (1,3-dimethylimidazolidin-2-ylidene) Phosphoramidate linkage
  modified_base order(2..10,11..28): mod_base = OTHER; note = Phosphorothioate linkage
  modified_base 10^11: mod_base = OTHER; note = Methylphosphonate linkage
  misc_feature 1..29: note = RM109681
tgccatacnntgccaccagggcgatggcc

SEQ ID NO: 907 - DNA, 26 bp, synthetic construct
  source 1..26: mol_type = other DNA
  misc_feature 16..17: note = DNA
  misc_feature order(1..15,18..26): note = RNA
  modified_base 15: mod_base = OTHER; note = 2-Prime-O-Methoxyethyl modified 5-methyl Cytidine
  modified_base 16: mod_base = OTHER; note = DNA nucleotide carrying a 6-amino-5-nitro-3-yl-2(1H)-pyridone nucleobase
  modified_base 17: mod_base = OTHER; note = DNA nucleotide carrying a hypoxanthine nucleobase
  modified_base order(13..14,19,23,26): mod_base = OTHER; note = 2-Prime-Fluoro modified nucleoside
  modified_base order(1..12,18,20..22,24..25): mod_base = OTHER; note = 2-Prime-O-Methyl modified nucleoside
  modified_base order(1^2,25^26): mod_base = OTHER; note = (1,3-dimethylimidazolidin-2-ylidene) Phosphoramidate linkage
  modified_base order(2..17,18..25): mod_base = OTHER; note = Phosphorothioate linkage
  modified_base 17^18: mod_base = OTHER; note = Methylphosphonate linkage
  misc_feature 1..26: note = RM109682
ggcatgatgccatacnntgccaccag

SEQ ID NO: 908 - DNA, 26 bp, synthetic construct
  source 1..26: mol_type = other DNA
  misc_feature 13..14: note = DNA
  misc_feature order(1..12,15..26): note = RNA
  modified_base 12: mod_base = OTHER; note = 2-Prime-O-Methoxyethyl modified 5-methyl Cytidine
  modified_base 13: mod_base = OTHER; note = DNA nucleotide carrying a 6-amino-5-nitro-3-yl-2(1H)-pyridone nucleobase
  modified_base 14: mod_base = OTHER; note = DNA nucleotide carrying a hypoxanthine nucleobase
  modified_base order(10..11,16,20,23): mod_base = OTHER; note = 2-Prime-Fluoro modified nucleoside
  modified_base order(1..9,15,17..19,21..22,24..26): mod_base = OTHER; note = 2-Prime-O-Methyl modified nucleoside
  modified_base order(1^2,25^26): mod_base = OTHER; note = (1,3-dimethylimidazolidin-2-ylidene) Phosphoramidate linkage
  modified_base order(2..14,15..25): mod_base = OTHER; note = Phosphorothioate linkage
  modified_base 14^15: mod_base = OTHER; note = Methylphosphonate linkage
  misc_feature 1..26: note = RM109683
atgatgccatacnntgccaccagggc

SEQ ID NO: 909 - DNA, 26 bp, synthetic construct
  source 1..26: mol_type = other DNA
  misc_feature 10..11: note = DNA
  misc_feature order(1..9,12..26): note = RNA
  modified_base 9: mod_base = OTHER; note = 2-Prime-O-Methoxyethyl modified 5-methyl Cytidine
  modified_base 10: mod_base = OTHER; note = DNA nucleotide carrying a 6-amino-5-nitro-3-yl-2(1H)-pyridone nucleobase
  modified_base 11: mod_base = OTHER; note = DNA nucleotide carrying a hypoxanthine nucleobase
  modified_base order(7..8,13,17,20): mod_base = OTHER; note = 2-Prime-Fluoro modified nucleoside
  modified_base order(1..6,12,14..16,18..19,21..26): mod_base = OTHER; note = 2-Prime-O-Methyl modified nucleoside
  modified_base order(1^2,25^26): mod_base = OTHER; note = (1,3-dimethylimidazolidin-2-ylidene) Phosphoramidate linkage
  modified_base order(2..11,12..25): mod_base = OTHER; note = Phosphorothioate linkage
  modified_base 11^12: mod_base = OTHER; note = Methylphosphonate linkage
  misc_feature 1..26: note = RM109684
atgccatacnntgccaccagggcgat

SEQ ID NO: 910 - DNA, 26 bp, synthetic construct
  source 1..26: mol_type = other DNA
  misc_feature 7..8: note = DNA
  misc_feature order(1..6,9..26): note = RNA
  modified_base 6: mod_base = OTHER; note = 2-Prime-O-Methoxyethyl modified 5-methyl Cytidine
  modified_base 7: mod_base = OTHER; note = DNA nucleotide carrying a 6-amino-5-nitro-3-yl-2(1H)-pyridone nucleobase
  modified_base 8: mod_base = OTHER; note = DNA nucleotide carrying a hypoxanthine nucleobase
  modified_base order(4..5,10,14,17): mod_base = OTHER; note = 2-Prime-Fluoro modified nucleoside
  modified_base order(1..3,9,11..13,15..16,18..26): mod_base = OTHER; note = 2-Prime-O-Methyl modified nucleoside
  modified_base order(1^2,25^26): mod_base = OTHER; note = (1,3-dimethylimidazolidin-2-ylidene) Phosphoramidate linkage
  modified_base order(2..8,9..25): mod_base = OTHER; note = Phosphorothioate linkage
  modified_base 8^9: mod_base = OTHER; note = Methylphosphonate linkage
  misc_feature 1..26: note = RM109685
ccatacnntgccaccagggcgatggc

SEQ ID NO: 911 - DNA, 29 bp, synthetic construct
  source 1..29: mol_type = other DNA
  misc_feature 18..19: note = DNA
  misc_feature order(1..17,20..29): note = RNA
  modified_base 17: mod_base = OTHER; note = 2-Prime-O-Methoxyethyl modified 5-methyl Cytidine
  modified_base 18: mod_base = OTHER; note = DNA nucleotide carrying a 6-amino-5-nitro-3-yl-2(1H)-pyridone nucleobase
  modified_base 19: mod_base = OTHER; note = DNA nucleotide carrying a hypoxanthine nucleobase
  modified_base order(15..16,21,25,28): mod_base = OTHER; note = 2-Prime-Fluoro modified nucleoside
  modified_base order(1..14,20,22..24,26..27,29): mod_base = OTHER; note = 2-Prime-O-Methyl modified nucleoside
  modified_base order(1^2,28^29): mod_base = OTHER; note = (1,3-dimethylimidazolidin-2-ylidene) Phosphoramidate linkage
  modified_base order(2..19,20..28): mod_base = OTHER; note = Phosphorothioate linkage
  modified_base 19^20: mod_base = OTHER; note = Methylphosphonate linkage
  misc_feature 1..29: note = RM109686
ggggcatgatgccatacnntgccaccagg

SEQ ID NO: 912 - DNA, 29 bp, synthetic construct
  source 1..29: mol_type = other DNA
  misc_feature 15..16: note = DNA
  misc_feature order(1..14,17..29): note = RNA
  modified_base 14: mod_base = OTHER; note = 2-Prime-O-Methoxyethyl modified 5-methyl Cytidine
  modified_base 15: mod_base = OTHER; note = DNA nucleotide carrying a 6-amino-5-nitro-3-yl-2(1H)-pyridone nucleobase
  modified_base 16: mod_base = OTHER; note = DNA nucleotide carrying a hypoxanthine nucleobase
  modified_base order(12..13,18,22,25): mod_base = OTHER; note = 2-Prime-Fluoro modified nucleoside
  modified_base order(1..11,17,19..21,23..24,26..29): mod_base = OTHER; note = 2-Prime-O-Methyl modified nucleoside
  modified_base order(1^2,28^29): mod_base = OTHER; note = (1,3-dimethylimidazolidin-2-ylidene) Phosphoramidate linkage
  modified_base order(2..16,17..28): mod_base = OTHER; note = Phosphorothioate linkage
  modified_base 16^17: mod_base = OTHER; note = Methylphosphonate linkage
  misc_feature 1..29: note = RM109687
gcatgatgccatacnntgccaccagggcg

SEQ ID NO: 913 - DNA, 29 bp, synthetic construct
  source 1..29: mol_type = other DNA
  misc_feature 12..13: note = DNA
  misc_feature order(1..11,14..29): note = RNA
  modified_base 11: mod_base = OTHER; note = 2-Prime-O-Methoxyethyl modified 5-methyl Cytidine
  modified_base 12: mod_base = OTHER; note = DNA nucleotide carrying a 6-amino-5-nitro-3-yl-2(1H)-pyridone nucleobase
  modified_base 13: mod_base = OTHER; note = DNA nucleotide carrying a hypoxanthine nucleobase
  modified_base order(9..10,15,19,22): mod_base = OTHER; note = 2-Prime-Fluoro modified nucleoside
  modified_base order(1..8,14,16..18,20..21,23..29): mod_base = OTHER; note = 2-Prime-O-Methyl modified nucleoside
  modified_base order(1^2,28^29): mod_base = OTHER; note = (1,3-dimethylimidazolidin-2-ylidene) Phosphoramidate linkage
  modified_base order(2..13,14..28): mod_base = OTHER; note = Phosphorothioate linkage
  modified_base 13^14: mod_base = OTHER; note = Methylphosphonate linkage
  misc_feature 1..29: note = RM109688
tgatgccatacnntgccaccagggcgatg

SEQ ID NO: 914 - DNA, 29 bp, synthetic construct
  source 1..29: mol_type = other DNA
  misc_feature 9..10: note = DNA
  misc_feature order(1..8,11..29): note = RNA
  modified_base 8: mod_base = OTHER; note = 2-Prime-O-Methoxyethyl modified 5-methyl Cytidine
  modified_base 9: mod_base = OTHER; note = DNA nucleotide carrying a 6-amino-5-nitro-3-yl-2(1H)-pyridone nucleobase
  modified_base 10: mod_base = OTHER; note = DNA nucleotide carrying a hypoxanthine nucleobase
  modified_base order(6..7,12,16,19): mod_base = OTHER; note = 2-Prime-Fluoro modified nucleoside
  modified_base order(1..5,11,13..15,17..18,20..29): mod_base = OTHER; note = 2-Prime-O-Methyl modified nucleoside
  modified_base order(1^2,28^29): mod_base = OTHER; note = (1,3-dimethylimidazolidin-2-ylidene) Phosphoramidate linkage
  modified_base order(2..10,11..28): mod_base = OTHER; note = Phosphorothioate linkage
  modified_base 10^11: mod_base = OTHER; note = Methylphosphonate linkage
  misc_feature 1..29: note = RM109689
tgccatacnntgccaccagggcgatggcc

SEQ ID NO: 915 - DNA, 29 bp, synthetic construct
  source 1..29: mol_type = other DNA
  misc_feature 6..7: note = DNA
  misc_feature order(1..5,8..29): note = RNA
  modified_base 5: mod_base = OTHER; note = 2-Prime-O-Methoxyethyl modified 5-methyl Cytidine
  modified_base 6: mod_base = OTHER; note = DNA nucleotide carrying a 6-amino-5-nitro-3-yl-2(1H)-pyridone nucleobase
  modified_base 7: mod_base = OTHER; note = DNA nucleotide carrying a hypoxanthine nucleobase
  modified_base order(3..4,9,13,16): mod_base = OTHER; note = 2-Prime-Fluoro modified nucleoside
  modified_base order(1..2,8,10..12,14..15,17..29): mod_base = OTHER; note = 2-Prime-O-Methyl modified nucleoside
  modified_base order(1^2,28^29): mod_base = OTHER; note = (1,3-dimethylimidazolidin-2-ylidene) Phosphoramidate linkage
  modified_base order(2..7,8..28): mod_base = OTHER; note = Phosphorothioate linkage
  modified_base 7^8: mod_base = OTHER; note = Methylphosphonate linkage
  misc_feature 1..29: note = RM109690
catacnntgccaccagggcgatggccagc

SEQ ID NO: 916 - DNA, 32 bp, synthetic construct; identical to SEQ ID NO: 185
  source 1..32: mol_type = other DNA
  misc_feature 28..29: note = DNA
  misc_feature order(1..27,30..32): note = RNA
  modified_base 27: mod_base = OTHER; note = 2-Prime-O-Methoxyethyl modified 5-methyl Cytidine
  modified_base 28: mod_base = OTHER; note = DNA nucleotide carrying a 6-amino-5-nitro-3-yl-2(1H)-pyridone nucleobase
  modified_base 29: mod_base = OTHER; note = DNA nucleotide carrying a hypoxanthine nucleobase
  modified_base order(8,12,15..16,23,31): mod_base = OTHER; note = 2-Prime-Fluoro modified nucleoside
  modified_base order(1..7,9..11,13..14,17..22,24..26,30,32): mod_base = OTHER; note = 2-Prime-O-Methyl modified nucleoside
  modified_base order(1^2,31^32): mod_base = OTHER; note = (1,3-dimethylimidazolidin-2-ylidene) Phosphoramidate linkage
  modified_base order(2..29,30^31): mod_base = OTHER; note = Phosphorothioate linkage
  modified_base 29^30: mod_base = OTHER; note = Methylphosphonate linkage
  misc_feature 1..32: note = RM109691

SEQ ID NO: 917 - DNA, 32 bp, synthetic construct; identical to SEQ ID NO: 186
  source 1..32: mol_type = other DNA
  misc_feature 25..26: note = DNA
  misc_feature order(1..24,27..32): note = RNA
  modified_base 24: mod_base = OTHER; note = 2-Prime-O-Methoxyethyl modified 5-methyl Cytidine
  modified_base 25: mod_base = OTHER; note = DNA nucleotide carrying a 6-amino-5-nitro-3-yl-2(1H)-pyridone nucleobase
  modified_base 26: mod_base = OTHER; note = DNA nucleotide carrying a hypoxanthine nucleobase
  modified_base order(5,9,12..13,20,28): mod_base = OTHER; note = 2-Prime-Fluoro modified nucleoside
  modified_base order(1..4,6..8,10..11,14..19,21..23,27,29..32): mod_base = OTHER; note = 2-Prime-O-Methyl modified nucleoside
  modified_base order(1^2,31^32): mod_base = OTHER; note = (1,3-dimethylimidazolidin-2-ylidene) Phosphoramidate linkage
  modified_base order(2..26,27..31): mod_base = OTHER; note = Phosphorothioate linkage
  modified_base 26^27: mod_base = OTHER; note = Methylphosphonate linkage
  misc_feature 1..32: note = RM109692

SEQ ID NO: 918 - DNA, 32 bp, synthetic construct; identical to SEQ ID NO: 187
  source 1..32: mol_type = other DNA
  misc_feature 22..23: note = DNA
  misc_feature order(1..21,24..32): note = RNA
  modified_base 21: mod_base = OTHER; note = 2-Prime-O-Methoxyethyl modified 5-methyl Cytidine
  modified_base 22: mod_base = OTHER; note = DNA nucleotide carrying a 6-amino-5-nitro-3-yl-2(1H)-pyridone nucleobase
  modified_base 23: mod_base = OTHER; note = DNA nucleotide carrying a hypoxanthine nucleobase
  modified_base order(2,6,9..10,17,25): mod_base = OTHER; note = 2-Prime-Fluoro modified nucleoside
  modified_base order(1,3..5,7..8,11..16,18..20,24,26..32): mod_base = OTHER; note = 2-Prime-O-Methyl modified nucleoside
  modified_base order(1^2,31^32): mod_base = OTHER; note = (1,3-dimethylimidazolidin-2-ylidene) Phosphoramidate linkage
  modified_base order(2..23,24..31): mod_base = OTHER; note = Phosphorothioate linkage
  modified_base 23^24: mod_base = OTHER; note = Methylphosphonate linkage
  misc_feature 1..32: note = RM109693

SEQ ID NO: 919 - DNA, 23 bp, synthetic construct
  source 1..23: mol_type = other DNA
  misc_feature 18..19: note = DNA
  misc_feature order(1..17,20..23): note = RNA
  modified_base 17: mod_base = OTHER; note = 2-Prime-O-Methoxyethyl modified 5-methyl Cytidine
  modified_base 18: mod_base = OTHER; note = DNA nucleotide carrying a 6-amino-5-nitro-3-yl-2(1H)-pyridone nucleobase
  modified_base 19: mod_base = OTHER; note = DNA nucleotide carrying a hypoxanthine nucleobase
  modified_base order(5..6,13,21): mod_base = OTHER; note = 2-Prime-Fluoro modified nucleoside
  modified_base order(1..4,7..12,14..16,20,22..23): mod_base = OTHER; note = 2-Prime-O-Methyl modified nucleoside
  modified_base order(1^2,22^23): mod_base = OTHER; note = (1,3-dimethylimidazolidin-2-ylidene) Phosphoramidate linkage
  modified_base order(2..19,20..22): mod_base = OTHER; note = Phosphorothioate linkage
  modified_base 19^20: mod_base = OTHER; note = Methylphosphonate linkage
  misc_feature 1..23: note = RM109694
ggggcatgatgccatacnntgcc

SEQ ID NO: 920 - DNA, 23 bp, synthetic construct
  source 1..23: mol_type = other DNA
  misc_feature 15..16: note = DNA
  misc_feature order(1..14,17..23): note = RNA
  modified_base 14: mod_base = OTHER; note = 2-Prime-O-Methoxyethyl modified 5-methyl Cytidine
  modified_base 15: mod_base = OTHER; note = DNA nucleotide carrying a 6-amino-5-nitro-3-yl-2(1H)-pyridone nucleobase
  modified_base 16: mod_base = OTHER; note = DNA nucleotide carrying a hypoxanthine nucleobase
  modified_base order(2..3,10,18): mod_base = OTHER; note = 2-Prime-Fluoro modified nucleoside
  modified_base order(1,4..9,11..13,17,19..23): mod_base = OTHER; note = 2-Prime-O-Methyl modified nucleoside
  modified_base order(1^2,22^23): mod_base = OTHER; note = (1,3-dimethylimidazolidin-2-ylidene) Phosphoramidate linkage
  modified_base order(2..16,17..22): mod_base = OTHER; note = Phosphorothioate linkage
  modified_base 16^17: mod_base = OTHER; note = Methylphosphonate linkage
  misc_feature 1..23: note = RM109695
gcatgatgccatacnntgccacc

SEQ ID NO: 921 - DNA, 32 bp, synthetic construct; identical to SEQ ID NO: 5
  source 1..32: mol_type = other DNA
  misc_feature 19..20: note = DNA
  misc_feature order(1..18,21..32): note = RNA
  modified_base 18: mod_base = OTHER; note = 2-Prime-O-Methoxyethyl modified 5-methyl Cytidine
  modified_base 19: mod_base = OTHER; note = DNA nucleotide carrying a 6-amino-5-nitro-3-yl-2(1H)-pyridone nucleobase
  modified_base 20: mod_base = OTHER; note = DNA nucleotide carrying a hypoxanthine nucleobase
  modified_base order(6,9,12..13,17,22,27,30..31): mod_base = OTHER; note = 2-Prime-Fluoro modified nucleoside
  modified_base order(1..5,7..8,10..11,14..16,21,23..26,28..29,32): mod_base = OTHER; note = 2-Prime-O-Methyl modified nucleoside
  modified_base order(1^2,31^32): mod_base = OTHER; note = (1,3-dimethylimidazolidin-2-ylidene) Phosphoramidate linkage
  modified_base order(2..20,21..31): mod_base = OTHER; note = Phosphorothioate linkage
  modified_base 20^21: mod_base = OTHER; note = Methylphosphonate linkage
  misc_feature 1..32: note = RM109696

SEQ ID NO: 922 - DNA, 32 bp, synthetic construct; identical to SEQ ID NO: 189
  source 1..32: mol_type = other DNA
  misc_feature 16..17: note = DNA
  misc_feature order(1..15,18..32): note = RNA
  modified_base 15: mod_base = OTHER; note = 2-Prime-O-Methoxyethyl modified 5-methyl Cytidine
  modified_base 16: mod_base = OTHER; note = DNA nucleotide carrying a 6-amino-5-nitro-3-yl-2(1H)-pyridone nucleobase
  modified_base 17: mod_base = OTHER; note = DNA nucleotide carrying a hypoxanthine nucleobase
  modified_base order(3,6,9..10,14,19,24,27..28): mod_base = OTHER; note = 2-Prime-Fluoro modified nucleoside
  modified_base order(1..2,4..5,7..8,11..13,18,20..23,25..26,29..32): mod_base = OTHER; note = 2-Prime-O-Methyl modified nucleoside
  modified_base order(1^2,31^32): mod_base = OTHER; note = (1,3-dimethylimidazolidin-2-ylidene) Phosphoramidate linkage
  modified_base order(2..17,18..31): mod_base = OTHER; note = Phosphorothioate linkage
  modified_base 17^18: mod_base = OTHER; note = Methylphosphonate linkage
  misc_feature 1..32: note = RM109697

SEQ ID NO: 923 - DNA, 32 bp, synthetic construct; identical to SEQ ID NO: 189
  source 1..32: mol_type = other DNA
  misc_feature 16..17: note = DNA
  misc_feature order(1..15,18..32): note = RNA
  modified_base 15: mod_base = OTHER; note = 2-Prime-O-Methoxyethyl modified 5-methyl Cytidine
  modified_base 16: mod_base = OTHER; note = DNA nucleotide carrying a 6-amino-5-nitro-3-yl-2(1H)-pyridone nucleobase
  modified_base 17: mod_base = OTHER; note = DNA nucleotide carrying a hypoxanthine nucleobase
  modified_base order(6..7,10,19..20,24..25,28,31): mod_base = OTHER; note = 2-Prime-Fluoro modified nucleoside
  modified_base order(1..5,8..9,11..14,18,21..23,26..27,29..30,32): mod_base = OTHER; note = 2-Prime-O-Methyl modified nucleoside
  modified_base order(1^2,31^32): mod_base = OTHER; note = (1,3-dimethylimidazolidin-2-ylidene) Phosphoramidate linkage
  modified_base order(2..17,18..31): mod_base = OTHER; note = Phosphorothioate linkage
  modified_base 17^18: mod_base = OTHER; note = Methylphosphonate linkage
  misc_feature 1..32: note = RM109698

SEQ ID NO: 924 - DNA, 32 bp, synthetic construct; identical to SEQ ID NO: 190
  source 1..32: mol_type = other DNA
  misc_feature 13..14: note = DNA
  misc_feature order(1..12,15..32): note = RNA
  modified_base 12: mod_base = OTHER; note = 2-Prime-O-Methoxyethyl modified 5-methyl Cytidine
  modified_base 13: mod_base = OTHER; note = DNA nucleotide carrying a 6-amino-5-nitro-3-yl-2(1H)-pyridone nucleobase
  modified_base 14: mod_base = OTHER; note = DNA nucleotide carrying a hypoxanthine nucleobase
  modified_base order(3..4,7,16..17,21..22,25,28): mod_base = OTHER; note = 2-Prime-Fluoro modified nucleoside
  modified_base order(1..2,5..6,8..11,15,18..20,23..24,26..27,29..32): mod_base = OTHER; note = 2-Prime-O-Methyl modified nucleoside
  modified_base order(1^2,31^32): mod_base = OTHER; note = (1,3-dimethylimidazolidin-2-ylidene) Phosphoramidate linkage
  modified_base order(2..14,15..31): mod_base = OTHER; note = Phosphorothioate linkage
  modified_base 14^15: mod_base = OTHER; note = Methylphosphonate linkage
  misc_feature 1..32: note = RM109699

SEQ ID NO: 925 - DNA, 23 bp, synthetic construct
  source 1..23: mol_type = other DNA
  misc_feature 15..16: note = DNA
  misc_feature order(1..14,17..23): note = RNA
  modified_base 14: mod_base = OTHER; note = 2-Prime-O-Methoxyethyl modified 5-methyl Cytidine
  modified_base 15: mod_base = OTHER; note = DNA nucleotide carrying a 6-amino-5-nitro-3-yl-2(1H)-pyridone nucleobase
  modified_base 16: mod_base = OTHER; note = DNA nucleotide carrying a hypoxanthine nucleobase
  modified_base order(5,8..9,13,18,23): mod_base = OTHER; note = 2-Prime-Fluoro modified nucleoside
  modified_base order(1..4,6..7,10..12,17,19..22): mod_base = OTHER; note = 2-Prime-O-Methyl modified nucleoside
  modified_base order(1^2,22^23): mod_base = OTHER; note = (1,3-dimethylimidazolidin-2-ylidene) Phosphoramidate linkage
  modified_base order(2..16,17..22): mod_base = OTHER; note = Phosphorothioate linkage
  modified_base 16^17: mod_base = OTHER; note = Methylphosphonate linkage
  misc_feature 1..23: note = RM109700
gcatgatgccatacnntgccacc

SEQ ID NO: 926 - DNA, 23 bp, synthetic construct
  source 1..23: mol_type = other DNA
  misc_feature 12..13: note = DNA
  misc_feature order(1..11,14..23): note = RNA
  modified_base 11: mod_base = OTHER; note = 2-Prime-O-Methoxyethyl modified 5-methyl Cytidine
  modified_base 12: mod_base = OTHER; note = DNA nucleotide carrying a 6-amino-5-nitro-3-yl-2(1H)-pyridone nucleobase
  modified_base 13: mod_base = OTHER; note = DNA nucleotide carrying a hypoxanthine nucleobase
  modified_base order(2,5..6,10,15,20): mod_base = OTHER; note = 2-Prime-Fluoro modified nucleoside
  modified_base order(1,3..4,7..9,14,16..19,21..23): mod_base = OTHER; note = 2-Prime-O-Methyl modified nucleoside
  modified_base order(1^2,22^23): mod_base = OTHER; note = (1,3-dimethylimidazolidin-2-ylidene) Phosphoramidate linkage
  modified_base order(2..13,14..22): mod_base = OTHER; note = Phosphorothioate linkage
  modified_base 13^14: mod_base = OTHER; note = Methylphosphonate linkage
  misc_feature 1..23: note = RM109701
tgatgccatacnntgccaccagg

SEQ ID NO: 927 - DNA, 32 bp, synthetic construct; identical to SEQ ID NO: 187
  source 1..32: mol_type = other DNA
  misc_feature 22..23: note = DNA
  misc_feature order(1..21,24..32): note = RNA
  modified_base 21: mod_base = OTHER; note = 2-Prime-O-Methoxyethyl modified 5-methyl Cytidine
  modified_base 22: mod_base = OTHER; note = DNA nucleotide carrying a 6-amino-5-nitro-3-yl-2(1H)-pyridone nucleobase
  modified_base 23: mod_base = OTHER; note = DNA nucleotide carrying a hypoxanthine nucleobase
  modified_base order(12,15..16,20,25,30): mod_base = OTHER; note = 2-Prime-Fluoro modified nucleoside
  modified_base order(1..11,13..14,17..19,24,26..29,31..32): mod_base = OTHER; note = 2-Prime-O-Methyl modified nucleoside
  modified_base order(1^2,31^32): mod_base = OTHER; note = (1,3-dimethylimidazolidin-2-ylidene) Phosphoramidate linkage
  modified_base order(2..23,24..31): mod_base = OTHER; note = Phosphorothioate linkage
  modified_base 23^24: mod_base = OTHER; note = Methylphosphonate linkage
  misc_feature 1..32: note = RM109702

SEQ ID NO: 928 - DNA, 32 bp, synthetic construct; identical to SEQ ID NO: 5
  source 1..32: mol_type = other DNA
  misc_feature 19..20: note = DNA
  misc_feature order(1..18,21..32): note = RNA
  modified_base 18: mod_base = OTHER; note = 2-Prime-O-Methoxyethyl modified 5-methyl Cytidine
  modified_base 19: mod_base = OTHER; note = DNA nucleotide carrying a 6-amino-5-nitro-3-yl-2(1H)-pyridone nucleobase
  modified_base 20: mod_base = OTHER; note = DNA nucleotide carrying a hypoxanthine nucleobase
  modified_base order(9,12..13,17,22,27): mod_base = OTHER; note = 2-Prime-Fluoro modified nucleoside
  modified_base order(1..8,10..11,14..16,21,23..26,28..32): mod_base = OTHER; note = 2-Prime-O-Methyl modified nucleoside
  modified_base order(1^2,31^32): mod_base = OTHER; note = (1,3-dimethylimidazolidin-2-ylidene) Phosphoramidate linkage
  modified_base order(2..20,21..31): mod_base = OTHER; note = Phosphorothioate linkage
  modified_base 20^21: mod_base = OTHER; note = Methylphosphonate linkage
  misc_feature 1..32: note = RM109703

SEQ ID NO: 929 - DNA, 32 bp, synthetic construct; identical to SEQ ID NO: 189
  source 1..32: mol_type = other DNA
  misc_feature 16..17: note = DNA
  misc_feature order(1..15,18..32): note = RNA
  modified_base 15: mod_base = OTHER; note = 2-Prime-O-Methoxyethyl modified 5-methyl Cytidine
  modified_base 16: mod_base = OTHER; note = DNA nucleotide carrying a 6-amino-5-nitro-3-yl-2(1H)-pyridone nucleobase
  modified_base 17: mod_base = OTHER; note = DNA nucleotide carrying a hypoxanthine nucleobase
  modified_base order(6,9..10,14,19,24): mod_base = OTHER; note = 2-Prime-Fluoro modified nucleoside
  modified_base order(1..5,7..8,11..13,18,20..23,25..32): mod_base = OTHER; note = 2-Prime-O-Methyl modified nucleoside
  modified_base order(1^2,31^32): mod_base = OTHER; note = (1,3-dimethylimidazolidin-2-ylidene) Phosphoramidate linkage
  modified_base order(2..17,18..31): mod_base = OTHER; note = Phosphorothioate linkage
  modified_base 17^18: mod_base = OTHER; note = Methylphosphonate linkage
  misc_feature 1..32: note = RM109704

SEQ ID NO: 930 - DNA, 32 bp, synthetic construct; identical to SEQ ID NO: 190
  source 1..32: mol_type = other DNA
  misc_feature 13..14: note = DNA
  misc_feature order(1..12,15..32): note = RNA
  modified_base 12: mod_base = OTHER; note = 2-Prime-O-Methoxyethyl modified 5-methyl Cytidine
  modified_base 13: mod_base = OTHER; note = DNA nucleotide carrying a 6-amino-5-nitro-3-yl-2(1H)-pyridone nucleobase
  modified_base 14: mod_base = OTHER; note = DNA nucleotide carrying a hypoxanthine nucleobase
  modified_base order(3,6..7,11,16,21): mod_base = OTHER; note = 2-Prime-Fluoro modified nucleoside
  modified_base order(1..2,4..5,8..10,15,17..20,22..32): mod_base = OTHER; note = 2-Prime-O-Methyl modified nucleoside
  modified_base order(1^2,31^32): mod_base = OTHER; note = (1,3-dimethylimidazolidin-2-ylidene) Phosphoramidate linkage
  modified_base order(2..14,15..31): mod_base = OTHER; note = Phosphorothioate linkage
  modified_base 14^15: mod_base = OTHER; note = Methylphosphonate linkage
  misc_feature 1..32: note = RM109705

SEQ ID NO: 931 - DNA, 23 bp, synthetic construct
  source 1..23: mol_type = other DNA
  misc_feature 9..10: note = DNA
  misc_feature order(1..8,11..23): note = RNA
  modified_base 8: mod_base = OTHER; note = 2-Prime-O-Methoxyethyl modified 5-methyl Cytidine
  modified_base 9: mod_base = OTHER; note = DNA nucleotide carrying a 6-amino-5-nitro-3-yl-2(1H)-pyridone nucleobase
  modified_base 10: mod_base = OTHER; note = DNA nucleotide carrying a hypoxanthine nucleobase
  modified_base order(3,12..13,17..18,21): mod_base = OTHER; note = 2-Prime-Fluoro modified nucleoside
  modified_base order(1..2,4..7,11,14..16,19..20,22..23): mod_base = OTHER; note = 2-Prime-O-Methyl modified nucleoside
  modified_base order(1^2,22^23): mod_base = OTHER; note = (1,3-dimethylimidazolidin-2-ylidene) Phosphoramidate linkage
  modified_base order(2..10,11..22): mod_base = OTHER; note = Phosphorothioate linkage
  modified_base 10^11: mod_base = OTHER; note = Methylphosphonate linkage
  misc_feature 1..23: note = RM109706
tgccatacnntgccaccagggcg

SEQ ID NO: 932 - DNA, 32 bp, synthetic construct; identical to SEQ ID NO: 5
  source 1..32: mol_type = other DNA
  misc_feature 19..20: note = DNA
  misc_feature order(1..18,21..32): note = RNA
  modified_base 18: mod_base = OTHER; note = 2-Prime-O-Methoxyethyl modified 5-methyl Cytidine
  modified_base 19: mod_base = OTHER; note = DNA nucleotide carrying a 6-amino-5-nitro-3-yl-2(1H)-pyridone nucleobase
  modified_base 20: mod_base = OTHER; note = DNA nucleotide carrying a hypoxanthine nucleobase
  modified_base order(13,22..23,27..28,31): mod_base = OTHER; note = 2-Prime-Fluoro modified nucleoside
  modified_base order(1..12,14..17,21,24..26,29..30,32): mod_base = OTHER; note = 2-Prime-O-Methyl modified nucleoside
  modified_base order(1^2,31^32): mod_base = OTHER; note = (1,3-dimethylimidazolidin-2-ylidene) Phosphoramidate linkage
  modified_base order(2..20,21..31): mod_base = OTHER; note = Phosphorothioate linkage
  modified_base 20^21: mod_base = OTHER; note = Methylphosphonate linkage
  misc_feature 1..32: note = RM109707

SEQ ID NO: 933 - DNA, 32 bp, synthetic construct; identical to SEQ ID NO: 189
  source 1..32: mol_type = other DNA
  misc_feature 16..17: note = DNA
  misc_feature order(1..15,18..32): note = RNA
  modified_base 15: mod_base = OTHER; note = 2-Prime-O-Methoxyethyl modified 5-methyl Cytidine
  modified_base 16: mod_base = OTHER; note = DNA nucleotide carrying a 6-amino-5-nitro-3-yl-2(1H)-pyridone nucleobase
  modified_base 17: mod_base = OTHER; note = DNA nucleotide carrying a hypoxanthine nucleobase
  modified_base order(10,19..20,24..25,28): mod_base = OTHER; note = 2-Prime-Fluoro modified nucleoside
  modified_base order(1..9,11..14,18,21..23,26..27,29..32): mod_base = OTHER; note = 2-Prime-O-Methyl modified nucleoside
  modified_base order(1^2,31^32): mod_base = OTHER; note = (1,3-dimethylimidazolidin-2-ylidene) Phosphoramidate linkage
  modified_base order(2..17,18..31): mod_base = OTHER; note = Phosphorothioate linkage
  modified_base 17^18: mod_base = OTHER; note = Methylphosphonate linkage
  misc_feature 1..32: note = RM109708

SEQ ID NO: 934 - DNA, 32 bp, synthetic construct; identical to SEQ ID NO: 190
  source 1..32: mol_type = other DNA
  misc_feature 13..14: note = DNA
  misc_feature order(1..12,15..32): note = RNA
  modified_base 12: mod_base = OTHER; note = 2-Prime-O-Methoxyethyl modified 5-methyl Cytidine
  modified_base 13: mod_base = OTHER; note = DNA nucleotide carrying a 6-amino-5-nitro-3-yl-2(1H)-pyridone nucleobase
  modified_base 14: mod_base = OTHER; note = DNA nucleotide carrying a hypoxanthine nucleobase
  modified_base order(7,16..17,21..22,25): mod_base = OTHER; note = 2-Prime-Fluoro modified nucleoside
  modified_base order(1..6,8..11,15,18..20,23..24,26..32): mod_base = OTHER; note = 2-Prime-O-Methyl modified nucleoside
  modified_base order(1^2,31^32): mod_base = OTHER; note = (1,3-dimethylimidazolidin-2-ylidene) Phosphoramidate linkage
  modified_base order(2..14,15..31): mod_base = OTHER; note = Phosphorothioate linkage
  modified_base 14^15: mod_base = OTHER; note = Methylphosphonate linkage
  misc_feature 1..32: note = RM109709

SEQ ID NO: 935 - DNA, 32 bp, synthetic construct; identical to SEQ ID NO: 191
  source 1..32: mol_type = other DNA
  misc_feature 10..11: note = DNA
  misc_feature order(1..9,12..32): note = RNA
  modified_base 9: mod_base = OTHER; note = 2-Prime-O-Methoxyethyl modified 5-methyl Cytidine
  modified_base 10: mod_base = OTHER; note = DNA nucleotide carrying a 6-amino-5-nitro-3-yl-2(1H)-pyridone nucleobase
  modified_base 11: mod_base = OTHER; note = DNA nucleotide carrying a hypoxanthine nucleobase
  modified_base order(4,13..14,18..19,22): mod_base = OTHER; note = 2-Prime-Fluoro modified nucleoside
  modified_base order(1..3,5..8,12,15..17,20..21,23..32): mod_base = OTHER; note = 2-Prime-O-Methyl modified nucleoside
  modified_base order(1^2,31^32): mod_base = OTHER; note = (1,3-dimethylimidazolidin-2-ylidene) Phosphoramidate linkage
  modified_base order(2..11,12..31): mod_base = OTHER; note = Phosphorothioate linkage
  modified_base 11^12: mod_base = OTHER; note = Methylphosphonate linkage
  misc_feature 1..32: note = RM109710

SEQ ID NO: 936 - DNA, 32 bp, synthetic construct; identical to SEQ ID NO: 192
  source 1..32: mol_type = other DNA
  misc_feature 7..8: note = DNA
  misc_feature order(1..6,9..32): note = RNA
  modified_base 6: mod_base = OTHER; note = 2-Prime-O-Methoxyethyl modified 5-methyl Cytidine
  modified_base 7: mod_base = OTHER; note = DNA nucleotide carrying a 6-amino-5-nitro-3-yl-2(1H)-pyridone nucleobase
  modified_base 8: mod_base = OTHER; note = DNA nucleotide carrying a hypoxanthine nucleobase
  modified_base order(1,10..11,15..16,19): mod_base = OTHER; note = 2-Prime-Fluoro modified nucleoside
  modified_base order(2..5,9,12..14,17..18,20..32): mod_base = OTHER; note = 2-Prime-O-Methyl modified nucleoside
  modified_base order(1^2,31^32): mod_base = OTHER; note = (1,3-dimethylimidazolidin-2-ylidene) Phosphoramidate linkage
  modified_base order(2..8,9..31): mod_base = OTHER; note = Phosphorothioate linkage
  modified_base 8^9: mod_base = OTHER; note = Methylphosphonate linkage
  misc_feature 1..32: note = RM109711

SEQ ID NO: 937 - DNA, 32 bp, synthetic construct; identical to SEQ ID NO: 185
  source 1..32: mol_type = other DNA
  misc_feature 28..29: note = DNA
  misc_feature order(1..27,30..32): note = RNA
  modified_base 27: mod_base = OTHER; note = 2-Prime-O-Methoxyethyl modified 5-methyl Cytidine
  modified_base 28: mod_base = OTHER; note = DNA nucleotide carrying a 6-amino-5-nitro-3-yl-2(1H)-pyridone nucleobase
  modified_base 29: mod_base = OTHER; note = DNA nucleotide carrying a hypoxanthine nucleobase
  modified_base order(22,26,31): mod_base = OTHER; note = 2-Prime-Fluoro modified nucleoside
  modified_base order(1..21,23..25,30,32): mod_base = OTHER; note = 2-Prime-O-Methyl modified nucleoside
  modified_base order(1^2,31^32): mod_base = OTHER; note = (1,3-dimethylimidazolidin-2-ylidene) Phosphoramidate linkage
  modified_base order(2..29,30^31): mod_base = OTHER; note = Phosphorothioate linkage
  modified_base 29^30: mod_base = OTHER; note = Methylphosphonate linkage
  misc_feature 1..32: note = RM109712

SEQ ID NO: 938 - DNA, 32 bp, synthetic construct; identical to SEQ ID NO: 186
  source 1..32: mol_type = other DNA
  misc_feature 25..26: note = DNA
  misc_feature order(1..24,27..32): note = RNA
  modified_base 24: mod_base = OTHER; note = 2-Prime-O-Methoxyethyl modified 5-methyl Cytidine
  modified_base 25: mod_base = OTHER; note = DNA nucleotide carrying a 6-amino-5-nitro-3-yl-2(1H)-pyridone nucleobase
  modified_base 26: mod_base = OTHER; note = DNA nucleotide carrying a hypoxanthine nucleobase
  modified_base order(19,23,28): mod_base = OTHER; note = 2-Prime-Fluoro modified nucleoside
  modified_base order(1..18,20..22,27,29..32): mod_base = OTHER; note = 2-Prime-O-Methyl modified nucleoside
  modified_base order(1^2,31^32): mod_base = OTHER; note = (1,3-dimethylimidazolidin-2-ylidene) Phosphoramidate linkage
  modified_base order(2..26,27..31): mod_base = OTHER; note = Phosphorothioate linkage
  modified_base 26^27: mod_base = OTHER; note = Methylphosphonate linkage
  misc_feature 1..32: note = RM109713

SEQ ID NO: 939 - DNA, 32 bp, synthetic construct; identical to SEQ ID NO: 187
  source 1..32: mol_type = other DNA
  misc_feature 22..23: note = DNA
  misc_feature order(1..21,24..32): note = RNA
  modified_base 21: mod_base = OTHER; note = 2-Prime-O-Methoxyethyl modified 5-methyl Cytidine
  modified_base 22: mod_base = OTHER; note = DNA nucleotide carrying a 6-amino-5-nitro-3-yl-2(1H)-pyridone nucleobase
  modified_base 23: mod_base = OTHER; note = DNA nucleotide carrying a hypoxanthine nucleobase
  modified_base order(16,20,25): mod_base = OTHER; note = 2-Prime-Fluoro modified nucleoside
  modified_base order(1..15,17..19,24,26..32): mod_base = OTHER; note = 2-Prime-O-Methyl modified nucleoside
  modified_base order(1^2,31^32): mod_base = OTHER; note = (1,3-dimethylimidazolidin-2-ylidene) Phosphoramidate linkage
  modified_base order(2..23,24..31): mod_base = OTHER; note = Phosphorothioate linkage
  modified_base 23^24: mod_base = OTHER; note = Methylphosphonate linkage
  misc_feature 1..32: note = RM109714

SEQ ID NO: 940 - DNA, 32 bp, synthetic construct; identical to SEQ ID NO: 5
  source 1..32: mol_type = other DNA
  misc_feature 19..20: note = DNA
  misc_feature order(1..18,21..32): note = RNA
  modified_base 18: mod_base = OTHER; note = 2-Prime-O-Methoxyethyl modified 5-methyl Cytidine
  modified_base 19: mod_base = OTHER; note = DNA nucleotide carrying a 6-amino-5-nitro-3-yl-2(1H)-pyridone nucleobase
  modified_base 20: mod_base = OTHER; note = DNA nucleotide carrying a hypoxanthine nucleobase
  modified_base order(13,17,22): mod_base = OTHER; note = 2-Prime-Fluoro modified nucleoside
  modified_base order(1..12,14..16,21,23..32): mod_base = OTHER; note = 2-Prime-O-Methyl modified nucleoside
  modified_base order(1^2,31^32): mod_base = OTHER; note = (1,3-dimethylimidazolidin-2-ylidene) Phosphoramidate linkage
  modified_base order(2..20,21..31): mod_base = OTHER; note = Phosphorothioate linkage
  modified_base 20^21: mod_base = OTHER; note = Methylphosphonate linkage
  misc_feature 1..32: note = RM109715

SEQ ID NO: 941 - DNA, 32 bp, synthetic construct; identical to SEQ ID NO: 189
  source 1..32: mol_type = other DNA
  misc_feature 16..17: note = DNA
  misc_feature order(1..15,18..32): note = RNA
  modified_base 15: mod_base = OTHER; note = 2-Prime-O-Methoxyethyl modified 5-methyl Cytidine
  modified_base 16: mod_base = OTHER; note = DNA nucleotide carrying a 6-amino-5-nitro-3-yl-2(1H)-pyridone nucleobase
  modified_base 17: mod_base = OTHER; note = DNA nucleotide carrying a hypoxanthine nucleobase
  modified_base order(10,14,19): mod_base = OTHER; note = 2-Prime-Fluoro modified nucleoside
  modified_base order(1..9,11..13,18,20..32): mod_base = OTHER; note = 2-Prime-O-Methyl modified nucleoside
  modified_base order(1^2,31^32): mod_base = OTHER; note = (1,3-dimethylimidazolidin-2-ylidene) Phosphoramidate linkage
  modified_base order(2..17,18..31): mod_base = OTHER; note = Phosphorothioate linkage
  modified_base 17^18: mod_base = OTHER; note = Methylphosphonate linkage
  misc_feature 1..32: note = RM109716

SEQ ID NO: 942 - DNA, 32 bp, synthetic construct; identical to SEQ ID NO: 190
  source 1..32: mol_type = other DNA
  misc_feature 13..14: note = DNA
  misc_feature order(1..12,15..32): note = RNA
  modified_base 12: mod_base = OTHER; note = 2-Prime-O-Methoxyethyl modified 5-methyl Cytidine
  modified_base 13: mod_base = OTHER; note = DNA nucleotide carrying a 6-amino-5-nitro-3-yl-2(1H)-pyridone nucleobase
  modified_base 14: mod_base = OTHER; note = DNA nucleotide carrying a hypoxanthine nucleobase
  modified_base order(7,11,16): mod_base = OTHER; note = 2-Prime-Fluoro modified nucleoside
  modified_base order(1..6,8..10,15,17..32): mod_base = OTHER; note = 2-Prime-O-Methyl modified nucleoside
  modified_base order(1^2,31^32): mod_base = OTHER; note = (1,3-dimethylimidazolidin-2-ylidene) Phosphoramidate linkage
  modified_base order(2..14,15..31): mod_base = OTHER; note = Phosphorothioate linkage
  modified_base 14^15: mod_base = OTHER; note = Methylphosphonate linkage
  misc_feature 1..32: note = RM109717

SEQ ID NO: 943 - DNA, 32 bp, synthetic construct; identical to SEQ ID NO: 191
  source 1..32: mol_type = other DNA
  misc_feature 10..11: note = DNA
  misc_feature order(1..9,12..32): note = RNA
  modified_base 9: mod_base = OTHER; note = 2-Prime-O-Methoxyethyl modified 5-methyl Cytidine
  modified_base 10: mod_base = OTHER; note = DNA nucleotide carrying a 6-amino-5-nitro-3-yl-2(1H)-pyridone nucleobase
  modified_base 11: mod_base = OTHER; note = DNA nucleotide carrying a hypoxanthine nucleobase
  modified_base order(4,8,13): mod_base = OTHER; note = 2-Prime-Fluoro modified nucleoside
  modified_base order(1..3,5..7,12,14..32): mod_base = OTHER; note = 2-Prime-O-Methyl modified nucleoside
  modified_base order(1^2,31^32): mod_base = OTHER; note = (1,3-dimethylimidazolidin-2-ylidene) Phosphoramidate linkage
  modified_base order(2..11,12..31): mod_base = OTHER; note = Phosphorothioate linkage
  modified_base 11^12: mod_base = OTHER; note = Methylphosphonate linkage
  misc_feature 1..32: note = RM109718

SEQ ID NO: 944 - DNA, 32 bp, synthetic construct; identical to SEQ ID NO: 192
  source 1..32: mol_type = other DNA
  misc_feature 7..8: note = DNA
  misc_feature order(1..6,9..32): note = RNA
  modified_base 6: mod_base = OTHER; note = 2-Prime-O-Methoxyethyl modified 5-methyl Cytidine
  modified_base 7: mod_base = OTHER; note = DNA nucleotide carrying a 6-amino-5-nitro-3-yl-2(1H)-pyridone nucleobase
  modified_base 8: mod_base = OTHER; note = DNA nucleotide carrying a hypoxanthine nucleobase
  modified_base order(1,5,10): mod_base = OTHER; note = 2-Prime-Fluoro modified nucleoside
  modified_base order(2..4,9,11..32): mod_base = OTHER; note = 2-Prime-O-Methyl modified nucleoside
  modified_base order(1^2,31^32): mod_base = OTHER; note = (1,3-dimethylimidazolidin-2-ylidene) Phosphoramidate linkage
  modified_base order(2..8,9..31): mod_base = OTHER; note = Phosphorothioate linkage
  modified_base 8^9: mod_base = OTHER; note = Methylphosphonate linkage
  misc_feature 1..32: note = RM109719

SEQ ID NO: 945 - DNA, 26 bp, synthetic construct
  source 1..26: mol_type = other DNA
  misc_feature 22..23: note = DNA
  misc_feature order(1..21,24..26): note = RNA
  modified_base 21: mod_base = OTHER; note = 2-Prime-O-Methoxyethyl modified 5-methyl Cytidine
  modified_base 22: mod_base = OTHER; note = DNA nucleotide carrying a 6-amino-5-nitro-3-yl-2(1H)-pyridone nucleobase
  modified_base 23: mod_base = OTHER; note = DNA nucleotide carrying a hypoxanthine nucleobase
  modified_base order(5,7..9,11,25..26): mod_base = OTHER; note = 2-Prime-Fluoro modified nucleoside
  modified_base order(1..4,6,10,12..20,24): mod_base = OTHER; note = 2-Prime-O-Methyl modified nucleoside
  modified_base order(1^2,25^26): mod_base = OTHER; note = (1,3-dimethylimidazolidin-2-ylidene) Phosphoramidate linkage
  modified_base order(2..23,24^25): mod_base = OTHER; note = Phosphorothioate linkage
  modified_base 23^24: mod_base = OTHER; note = Methylphosphonate linkage
  misc_feature 1..26: note = RM109720
gtgaggggcatgatgccatacnntgc

SEQ ID NO: 946 - DNA, 26 bp, synthetic construct
  source 1..26: mol_type = other DNA
  misc_feature 19..20: note = DNA
  misc_feature order(1..18,21..26): note = RNA
  modified_base 18: mod_base = OTHER; note = 2-Prime-O-Methoxyethyl modified 5-methyl Cytidine
  modified_base 19: mod_base = OTHER; note = DNA nucleotide carrying a 6-amino-5-nitro-3-yl-2(1H)-pyridone nucleobase
  modified_base 20: mod_base = OTHER; note = DNA nucleotide carrying a hypoxanthine nucleobase
  modified_base order(2,4..6,8,22..23): mod_base = OTHER; note = 2-Prime-Fluoro modified nucleoside
  modified_base order(1,3,7,9..17,21,24..26): mod_base = OTHER; note = 2-Prime-O-Methyl modified nucleoside
  modified_base order(1^2,25^26): mod_base = OTHER; note = (1,3-dimethylimidazolidin-2-ylidene) Phosphoramidate linkage
  modified_base order(2..20,21..25): mod_base = OTHER; note = Phosphorothioate linkage
  modified_base 20^21: mod_base = OTHER; note = Methylphosphonate linkage
  misc_feature 1..26: note = RM109721
aggggcatgatgccatacnntgccac

SEQ ID NO: 947 - DNA, 26 bp, synthetic construct
  source 1..26: mol_type = other DNA
  misc_feature 7..8: note = DNA
  misc_feature order(1..6,9..26): note = RNA
  modified_base 6: mod_base = OTHER; note = 2-Prime-O-Methoxyethyl modified 5-methyl Cytidine
  modified_base 7: mod_base = OTHER; note = DNA nucleotide carrying a 6-amino-5-nitro-3-yl-2(1H)-pyridone nucleobase
  modified_base 8: mod_base = OTHER; note = DNA nucleotide carrying a hypoxanthine nucleobase
  modified_base order(5,10,20,22..24,26): mod_base = OTHER; note = 2-Prime-Fluoro modified nucleoside
  modified_base order(1..4,9,11..19,21,25): mod_base = OTHER; note = 2-Prime-O-Methyl modified nucleoside
  modified_base order(1^2,25^26): mod_base = OTHER; note = (1,3-dimethylimidazolidin-2-ylidene) Phosphoramidate linkage
  modified_base order(2..8,9..25): mod_base = OTHER; note = Phosphorothioate linkage
  modified_base 8^9: mod_base = OTHER; note = Methylphosphonate linkage
  misc_feature 1..26: note = RM109722
ccatacnntgccaccagggcgatggc

SEQ ID NO: 948 - DNA, 26 bp, synthetic construct
  source 1..26: mol_type = other DNA
  misc_feature 22..23: note = DNA
  misc_feature order(1..21,24..26): note = RNA
  modified_base 21: mod_base = OTHER; note = 2-Prime-O-Methoxyethyl modified 5-methyl Cytidine
  modified_base 22: mod_base = OTHER; note = DNA nucleotide carrying a 6-amino-5-nitro-3-yl-2(1H)-pyridone nucleobase
  modified_base 23: mod_base = OTHER; note = DNA nucleotide carrying a hypoxanthine nucleobase
  modified_base order(7..9,11,25): mod_base = OTHER; note = 2-Prime-Fluoro modified nucleoside
  modified_base order(1..6,10,12..20,24,26): mod_base = OTHER; note = 2-Prime-O-Methyl modified nucleoside
  modified_base order(1^2,25^26): mod_base = OTHER; note = (1,3-dimethylimidazolidin-2-ylidene) Phosphoramidate linkage
  modified_base order(2..23,24^25): mod_base = OTHER; note = Phosphorothioate linkage
  modified_base 23^24: mod_base = OTHER; note = Methylphosphonate linkage
  misc_feature 1..26: note = RM109723
gtgaggggcatgatgccatacnntgc

SEQ ID NO: 949 - DNA, 26 bp, synthetic construct
  source 1..26: mol_type = other DNA
  misc_feature 19..20: note = DNA
  misc_feature order(1..18,21..26): note = RNA
  modified_base 18: mod_base = OTHER; note = 2-Prime-O-Methoxyethyl modified 5-methyl Cytidine
  modified_base 19: mod_base = OTHER; note = DNA nucleotide carrying a 6-amino-5-nitro-3-yl-2(1H)-pyridone nucleobase
  modified_base 20: mod_base = OTHER; note = DNA nucleotide carrying a hypoxanthine nucleobase
  modified_base order(4..6,8,22): mod_base = OTHER; note = 2-Prime-Fluoro modified nucleoside
  modified_base order(1..3,7,9..17,21,23..26): mod_base = OTHER; note = 2-Prime-O-Methyl modified nucleoside
  modified_base order(1^2,25^26): mod_base = OTHER; note = (1,3-dimethylimidazolidin-2-ylidene) Phosphoramidate linkage
  modified_base order(2..20,21..25): mod_base = OTHER; note = Phosphorothioate linkage
  modified_base 20^21: mod_base = OTHER; note = Methylphosphonate linkage
  misc_feature 1..26: note = RM109724
aggggcatgatgccatacnntgccac

SEQ ID NO: 950 - DNA, 26 bp, synthetic construct
  source 1..26: mol_type = other DNA
  misc_feature 16..17: note = DNA
  misc_feature order(1..15,18..26): note = RNA
  modified_base 15: mod_base = OTHER; note = 2-Prime-O-Methoxyethyl modified 5-methyl Cytidine
  modified_base 16: mod_base = OTHER; note = DNA nucleotide carrying a 6-amino-5-nitro-3-yl-2(1H)-pyridone nucleobase
  modified_base 17: mod_base = OTHER; note = DNA nucleotide carrying a hypoxanthine nucleobase
  modified_base order(1..3,5,19): mod_base = OTHER; note = 2-Prime-Fluoro modified nucleoside
  modified_base order(4,6..14,18,20..26): mod_base = OTHER; note = 2-Prime-O-Methyl modified nucleoside
  modified_base order(1^2,25^26): mod_base = OTHER; note = (1,3-dimethylimidazolidin-2-ylidene) Phosphoramidate linkage
  modified_base order(2..17,18..25): mod_base = OTHER; note = Phosphorothioate linkage
  modified_base 17^18: mod_base = OTHER; note = Methylphosphonate linkage
  misc_feature 1..26: note = RM109725
ggcatgatgccatacnntgccaccag

SEQ ID NO: 951 - DNA, 29 bp, synthetic construct
  source 1..29: mol_type = other DNA
  misc_feature 24..25: note = DNA
  misc_feature order(1..23,26..29): note = RNA
  modified_base 23: mod_base = OTHER; note = 2-Prime-O-Methoxyethyl modified 5-methyl Cytidine
  modified_base 24: mod_base = OTHER; note = DNA nucleotide carrying a 6-amino-5-nitro-3-yl-2(1H)-pyridone nucleobase
  modified_base 25: mod_base = OTHER; note = DNA nucleotide carrying a hypoxanthine nucleobase
  modified_base order(9..11,13,27): mod_base = OTHER; note = 2-Prime-Fluoro modified nucleoside
  modified_base order(1..8,12,14..22,26,28..29): mod_base = OTHER; note = 2-Prime-O-Methyl modified nucleoside
  modified_base order(1^2,28^29): mod_base = OTHER; note = (1,3-dimethylimidazolidin-2-ylidene) Phosphoramidate linkage
  modified_base order(2..25,26..28): mod_base = OTHER; note = Phosphorothioate linkage
  modified_base 25^26: mod_base = OTHER; note = Methylphosphonate linkage
  misc_feature 1..29: note = RM109726
ccgtgaggggcatgatgccatacnntgcc

SEQ ID NO: 952 - DNA, 29 bp, synthetic construct
  source 1..29: mol_type = other DNA
  misc_feature 21..22: note = DNA
  misc_feature order(1..20,23..29): note = RNA
  modified_base 20: mod_base = OTHER; note = 2-Prime-O-Methoxyethyl modified 5-methyl Cytidine
  modified_base 21: mod_base = OTHER; note = DNA nucleotide carrying a 6-amino-5-nitro-3-yl-2(1H)-pyridone nucleobase
  modified_base 22: mod_base = OTHER; note = DNA nucleotide carrying a hypoxanthine nucleobase
  modified_base order(6..8,10,24): mod_base = OTHER; note = 2-Prime-Fluoro modified nucleoside
  modified_base order(1..5,9,11..19,23,25..29): mod_base = OTHER; note = 2-Prime-O-Methyl modified nucleoside
  modified_base order(1^2,28^29): mod_base = OTHER; note = (1,3-dimethylimidazolidin-2-ylidene) Phosphoramidate linkage
  modified_base order(2..22,23..28): mod_base = OTHER; note = Phosphorothioate linkage
  modified_base 22^23: mod_base = OTHER; note = Methylphosphonate linkage
  misc_feature 1..29: note = RM109727
tgaggggcatgatgccatacnntgccacc

SEQ ID NO: 953 - DNA, 29 bp, synthetic construct
  source 1..29: mol_type = other DNA
  misc_feature 18..19: note = DNA
  misc_feature order(1..17,20..29): note = RNA
  modified_base 17: mod_base = OTHER; note = 2-Prime-O-Methoxyethyl modified 5-methyl Cytidine
  modified_base 18: mod_base = OTHER; note = DNA nucleotide carrying a 6-amino-5-nitro-3-yl-2(1H)-pyridone nucleobase
  modified_base 19: mod_base = OTHER; note = DNA nucleotide carrying a hypoxanthine nucleobase
  modified_base order(3..5,7,21): mod_base = OTHER; note = 2-Prime-Fluoro modified nucleoside
  modified_base order(1..2,6,8..16,20,22..29): mod_base = OTHER; note = 2-Prime-O-Methyl modified nucleoside
  modified_base order(1^2,28^29): mod_base = OTHER; note = (1,3-dimethylimidazolidin-2-ylidene) Phosphoramidate linkage
  modified_base order(2..19,20..28): mod_base = OTHER; note = Phosphorothioate linkage
  modified_base 19^20: mod_base = OTHER; note = Methylphosphonate linkage
  misc_feature 1..29: note = RM109728
ggggcatgatgccatacnntgccaccagg

SEQ ID NO: 954 - DNA, 23 bp, synthetic construct
  source 1..23: mol_type = other DNA
  misc_feature 18..19: note = DNA
  misc_feature order(1..17,20..23): note = RNA
  modified_base 17: mod_base = OTHER; note = 2-Prime-O-Methoxyethyl modified 5-methyl Cytidine
  modified_base 18: mod_base = OTHER; note = DNA nucleotide carrying a 6-amino-5-nitro-3-yl-2(1H)-pyridone nucleobase
  modified_base 19: mod_base = OTHER; note = DNA nucleotide carrying a hypoxanthine nucleobase
  modified_base order(7,21): mod_base = OTHER; note = 2-Prime-Fluoro modified nucleoside
  modified_base order(1..6,8..16,20,22..23): mod_base = OTHER; note = 2-Prime-O-Methyl modified nucleoside
  modified_base order(1^2,22^23): mod_base = OTHER; note = (1,3-dimethylimidazolidin-2-ylidene) Phosphoramidate linkage
  modified_base order(2..19,20..22): mod_base = OTHER; note = Phosphorothioate linkage
  modified_base 19^20: mod_base = OTHER; note = Methylphosphonate linkage
  misc_feature 1..23: note = RM109729
ggggcatgatgccatacnntgcc

SEQ ID NO: 955 - DNA, 23 bp, synthetic construct
  source 1..23: mol_type = other DNA
  misc_feature 15..16: note = DNA
  misc_feature order(1..14,17..23): note = RNA
  modified_base 14: mod_base = OTHER; note = 2-Prime-O-Methoxyethyl modified 5-methyl Cytidine
  modified_base 15: mod_base = OTHER; note = DNA nucleotide carrying a 6-amino-5-nitro-3-yl-2(1H)-pyridone nucleobase
  modified_base 16: mod_base = OTHER; note = DNA nucleotide carrying a hypoxanthine nucleobase
  modified_base order(4,18): mod_base = OTHER; note = 2-Prime-Fluoro modified nucleoside
  modified_base order(1..3,5..13,17,19..23): mod_base = OTHER; note = 2-Prime-O-Methyl modified nucleoside
  modified_base order(1^2,22^23): mod_base = OTHER; note = (1,3-dimethylimidazolidin-2-ylidene) Phosphoramidate linkage
  modified_base order(2..16,17..22): mod_base = OTHER; note = Phosphorothioate linkage
  modified_base 16^17: mod_base = OTHER; note = Methylphosphonate linkage
  misc_feature 1..23: note = RM109730
gcatgatgccatacnntgccacc

SEQ ID NO: 956 - DNA, 23 bp, synthetic construct
  source 1..23: mol_type = other DNA
  misc_feature 12..13: note = DNA
  misc_feature order(1..11,14..23): note = RNA
  modified_base 11: mod_base = OTHER; note = 2-Prime-O-Methoxyethyl modified 5-methyl Cytidine
  modified_base 12: mod_base = OTHER; note = DNA nucleotide carrying a 6-amino-5-nitro-3-yl-2(1H)-pyridone nucleobase
  modified_base 13: mod_base = OTHER; note = DNA nucleotide carrying a hypoxanthine nucleobase
  modified_base order(1,15): mod_base = OTHER; note = 2-Prime-Fluoro modified nucleoside
  modified_base order(2..10,14,16..23): mod_base = OTHER; note = 2-Prime-O-Methyl modified nucleoside
  modified_base order(1^2,22^23): mod_base = OTHER; note = (1,3-dimethylimidazolidin-2-ylidene) Phosphoramidate linkage
  modified_base order(2..13,14..22): mod_base = OTHER; note = Phosphorothioate linkage
  modified_base 13^14: mod_base = OTHER; note = Methylphosphonate linkage
  misc_feature 1..23: note = RM109731
tgatgccatacnntgccaccagg

SEQ ID NO: 957 - DNA, 26 bp, synthetic construct
  source 1..26: mol_type = other DNA
  misc_feature 22..23: note = DNA
  misc_feature order(1..21,24..26): note = RNA
  modified_base 21: mod_base = OTHER; note = 2-Prime-O-Methoxyethyl modified 5-methyl Cytidine
  modified_base 22: mod_base = OTHER; note = DNA nucleotide carrying a 6-amino-5-nitro-3-yl-2(1H)-pyridone nucleobase
  modified_base 23: mod_base = OTHER; note = DNA nucleotide carrying a hypoxanthine nucleobase
  modified_base order(11,25): mod_base = OTHER; note = 2-Prime-Fluoro modified nucleoside
  modified_base order(1..10,12..20,24,26): mod_base = OTHER; note = 2-Prime-O-Methyl modified nucleoside
  modified_base order(1^2,25^26): mod_base = OTHER; note = (1,3-dimethylimidazolidin-2-ylidene) Phosphoramidate linkage
  modified_base order(2..23,24^25): mod_base = OTHER; note = Phosphorothioate linkage
  modified_base 23^24: mod_base = OTHER; note = Methylphosphonate linkage
  misc_feature 1..26: note = RM109732
gtgaggggcatgatgccatacnntgc

SEQ ID NO: 958 - DNA, 26 bp, synthetic construct
  source 1..26: mol_type = other DNA
  misc_feature 19..20: note = DNA
  misc_feature order(1..18,21..26): note = RNA
  modified_base 18: mod_base = OTHER; note = 2-Prime-O-Methoxyethyl modified 5-methyl Cytidine
  modified_base 19: mod_base = OTHER; note = DNA nucleotide carrying a 6-amino-5-nitro-3-yl-2(1H)-pyridone nucleobase
  modified_base 20: mod_base = OTHER; note = DNA nucleotide carrying a hypoxanthine nucleobase
  modified_base order(8,22): mod_base = OTHER; note = 2-Prime-Fluoro modified nucleoside
  modified_base order(1..7,9..17,21,23..26): mod_base = OTHER; note = 2-Prime-O-Methyl modified nucleoside
  modified_base order(1^2,25^26): mod_base = OTHER; note = (1,3-dimethylimidazolidin-2-ylidene) Phosphoramidate linkage
  modified_base order(2..20,21..25): mod_base = OTHER; note = Phosphorothioate linkage
  modified_base 20^21: mod_base = OTHER; note = Methylphosphonate linkage
  misc_feature 1..26: note = RM109733
aggggcatgatgccatacnntgccac

SEQ ID NO: 959 - DNA, 26 bp, synthetic construct
  source 1..26: mol_type = other DNA
  misc_feature 16..17: note = DNA
  misc_feature order(1..15,18..26): note = RNA
  modified_base 15: mod_base = OTHER; note = 2-Prime-O-Methoxyethyl modified 5-methyl Cytidine
  modified_base 16: mod_base = OTHER; note = DNA nucleotide carrying a 6-amino-5-nitro-3-yl-2(1H)-pyridone nucleobase
  modified_base 17: mod_base = OTHER; note = DNA nucleotide carrying a hypoxanthine nucleobase
  modified_base order(5,19): mod_base = OTHER; note = 2-Prime-Fluoro modified nucleoside
  modified_base order(1..4,6..14,18,20..26): mod_base = OTHER; note = 2-Prime-O-Methyl modified nucleoside
  modified_base order(1^2,25^26): mod_base = OTHER; note = (1,3-dimethylimidazolidin-2-ylidene) Phosphoramidate linkage
  modified_base order(2..17,18..25): mod_base = OTHER; note = Phosphorothioate linkage
  modified_base 17^18: mod_base = OTHER; note = Methylphosphonate linkage
  misc_feature 1..26: note = RM109734
ggcatgatgccatacnntgccaccag

SEQ ID NO: 960 - DNA, 26 bp, synthetic construct
  source 1..26: mol_type = other DNA
  misc_feature 13..14: note = DNA
  misc_feature order(1..12,15..26): note = RNA
  modified_base 12: mod_base = OTHER; note = 2-Prime-O-Methoxyethyl modified 5-methyl Cytidine
  modified_base 13: mod_base = OTHER; note = DNA nucleotide carrying a 6-amino-5-nitro-3-yl-2(1H)-pyridone nucleobase
  modified_base 14: mod_base = OTHER; note = DNA nucleotide carrying a hypoxanthine nucleobase
  modified_base order(2,16): mod_base = OTHER; note = 2-Prime-Fluoro modified nucleoside
  modified_base order(1,3..11,15,17..26): mod_base = OTHER; note = 2-Prime-O-Methyl modified nucleoside
  modified_base order(1^2,25^26): mod_base = OTHER; note = (1,3-dimethylimidazolidin-2-ylidene) Phosphoramidate linkage
  modified_base order(2..14,15..25): mod_base = OTHER; note = Phosphorothioate linkage
  modified_base 14^15: mod_base = OTHER; note = Methylphosphonate linkage
  misc_feature 1..26: note = RM109735
atgatgccatacnntgccaccagggc

SEQ ID NO: 961 - DNA, 29 bp, synthetic construct
  source 1..29: mol_type = other DNA
  misc_feature 24..25: note = DNA
  misc_feature order(1..23,26..29): note = RNA
  modified_base 23: mod_base = OTHER; note = 2-Prime-O-Methoxyethyl modified 5-methyl Cytidine
  modified_base 24: mod_base = OTHER; note = DNA nucleotide carrying a 6-amino-5-nitro-3-yl-2(1H)-pyridone nucleobase
  modified_base 25: mod_base = OTHER; note = DNA nucleotide carrying a hypoxanthine nucleobase
  modified_base order(13,27): mod_base = OTHER; note = 2-Prime-Fluoro modified nucleoside
  modified_base order(1..12,14..22,26,28..29): mod_base = OTHER; note = 2-Prime-O-Methyl modified nucleoside
  modified_base order(1^2,28^29): mod_base = OTHER; note = (1,3-dimethylimidazolidin-2-ylidene) Phosphoramidate linkage
  modified_base order(2..25,26..28): mod_base = OTHER; note = Phosphorothioate linkage
  modified_base 25^26: mod_base = OTHER; note = Methylphosphonate linkage
  misc_feature 1..29: note = RM109736
ccgtgaggggcatgatgccatacnntgcc

SEQ ID NO: 962 - DNA, 29 bp, synthetic construct
  source 1..29: mol_type = other DNA
  misc_feature 21..22: note = DNA
  misc_feature order(1..20,23..29): note = RNA
  modified_base 20: mod_base = OTHER; note = 2-Prime-O-Methoxyethyl modified 5-methyl Cytidine
  modified_base 21: mod_base = OTHER; note = DNA nucleotide carrying a 6-amino-5-nitro-3-yl-2(1H)-pyridone nucleobase
  modified_base 22: mod_base = OTHER; note = DNA nucleotide carrying a hypoxanthine nucleobase
  modified_base order(10,24): mod_base = OTHER; note = 2-Prime-Fluoro modified nucleoside
  modified_base order(1..9,11..19,23,25..29): mod_base = OTHER; note = 2-Prime-O-Methyl modified nucleoside
  modified_base order(1^2,28^29): mod_base = OTHER; note = (1,3-dimethylimidazolidin-2-ylidene) Phosphoramidate linkage
  modified_base order(2..22,23..28): mod_base = OTHER; note = Phosphorothioate linkage
  modified_base 22^23: mod_base = OTHER; note = Methylphosphonate linkage
  misc_feature 1..29: note = RM109737
tgaggggcatgatgccatacnntgccacc

SEQ ID NO: 963 - DNA, 29 bp, synthetic construct
  source 1..29: mol_type = other DNA
  misc_feature 18..19: note = DNA
  misc_feature order(1..17,20..29): note = RNA
  modified_base 17: mod_base = OTHER; note = 2-Prime-O-Methoxyethyl modified 5-methyl Cytidine
  modified_base 18: mod_base = OTHER; note = DNA nucleotide carrying a 6-amino-5-nitro-3-yl-2(1H)-pyridone nucleobase
  modified_base 19: mod_base = OTHER; note = DNA nucleotide carrying a hypoxanthine nucleobase
  modified_base order(7,21): mod_base = OTHER; note = 2-Prime-Fluoro modified nucleoside
  modified_base order(1..6,8..16,20,22..29): mod_base = OTHER; note = 2-Prime-O-Methyl modified nucleoside
  modified_base order(1^2,28^29): mod_base = OTHER; note = (1,3-dimethylimidazolidin-2-ylidene) Phosphoramidate linkage
  modified_base order(2..19,20..28): mod_base = OTHER; note = Phosphorothioate linkage
  modified_base 19^20: mod_base = OTHER; note = Methylphosphonate linkage
  misc_feature 1..29: note = RM109738
ggggcatgatgccatacnntgccaccagg

SEQ ID NO: 964 - DNA, 29 bp, synthetic construct
  source 1..29: mol_type = other DNA
  misc_feature 15..16: note = DNA
  misc_feature order(1..14,17..29): note = RNA
  modified_base 14: mod_base = OTHER; note = 2-Prime-O-Methoxyethyl modified 5-methyl Cytidine
  modified_base 15: mod_base = OTHER; note = DNA nucleotide carrying a 6-amino-5-nitro-3-yl-2(1H)-pyridone nucleobase
  modified_base 16: mod_base = OTHER; note = DNA nucleotide carrying a hypoxanthine nucleobase
  modified_base order(4,18): mod_base = OTHER; note = 2-Prime-Fluoro modified nucleoside
  modified_base order(1..3,5..13,17,19..29): mod_base = OTHER; note = 2-Prime-O-Methyl modified nucleoside
  modified_base order(1^2,28^29): mod_base = OTHER; note = (1,3-dimethylimidazolidin-2-ylidene) Phosphoramidate linkage
  modified_base order(2..16,17..28): mod_base = OTHER; note = Phosphorothioate linkage
  modified_base 16^17: mod_base = OTHER; note = Methylphosphonate linkage
  misc_feature 1..29: note = RM109739
gcatgatgccatacnntgccaccagggcg

SEQ ID NO: 965 - DNA, 29 bp, synthetic construct
  source 1..29: mol_type = other DNA
  misc_feature 12..13: note = DNA
  misc_feature order(1..11,14..29): note = RNA
  modified_base 11: mod_base = OTHER; note = 2-Prime-O-Methoxyethyl modified 5-methyl Cytidine
  modified_base 12: mod_base = OTHER; note = DNA nucleotide carrying a 6-amino-5-nitro-3-yl-2(1H)-pyridone nucleobase
  modified_base 13: mod_base = OTHER; note = DNA nucleotide carrying a hypoxanthine nucleobase
  modified_base order(1,15): mod_base = OTHER; note = 2-Prime-Fluoro modified nucleoside
  modified_base order(2..10,14,16..29): mod_base = OTHER; note = 2-Prime-O-Methyl modified nucleoside
  modified_base order(1^2,28^29): mod_base = OTHER; note = (1,3-dimethylimidazolidin-2-ylidene) Phosphoramidate linkage
  modified_base order(2..13,14..28): mod_base = OTHER; note = Phosphorothioate linkage
  modified_base 13^14: mod_base = OTHER; note = Methylphosphonate linkage
  misc_feature 1..29: note = RM109740
tgatgccatacnntgccaccagggcgatg

SEQ ID NO: 966 - DNA, 32 bp, synthetic construct; identical to SEQ ID NO: 189
  source 1..32: mol_type = other DNA
  misc_feature 15..17: note = DNA
  misc_feature order(1..14,18..32): note = RNA
  modified_base 16: mod_base = OTHER; note = DNA nucleotide carrying a 6-amino-5-nitro-3-yl-2(1H)-pyridone nucleobase
  modified_base 17: mod_base = OTHER; note = DNA nucleotide carrying a hypoxanthine nucleobase
  modified_base order(2,5..6,13,19..22,31): mod_base = OTHER; note = 2-Prime-Fluoro modified nucleoside
  modified_base order(1,3..4,7..12,14,18,23..30,32): mod_base = OTHER; note = 2-Prime-O-Methyl modified nucleoside
  modified_base order(1^2,17^18,31^32): mod_base = OTHER; note = (1,3-dimethylimidazolidin-2-ylidene) Phosphoramidate linkage
  modified_base order(2..17,18..31): mod_base = OTHER; note = Phosphorothioate linkage
  misc_feature 1..32: note = RM109741

SEQ ID NO: 967 - DNA, 32 bp, synthetic construct; identical to SEQ ID NO: 189
  source 1..32: mol_type = other DNA
  misc_feature 15..17: note = DNA
  misc_feature order(1..14,18..32): note = RNA
  modified_base 16: mod_base = OTHER; note = DNA nucleotide carrying a 6-amino-5-nitro-3-yl-2(1H)-pyridone nucleobase
  modified_base 17: mod_base = OTHER; note = DNA nucleotide carrying a hypoxanthine nucleobase
  modified_base order(3,12..14,19,21,28..29,32): mod_base = OTHER; note = 2-Prime-Fluoro modified nucleoside
  modified_base order(1..2,4..11,18,20,22..27,30..31): mod_base = OTHER; note = 2-Prime-O-Methyl modified nucleoside
  modified_base order(1^2,17^18,31^32): mod_base = OTHER; note = (1,3-dimethylimidazolidin-2-ylidene) Phosphoramidate linkage
  modified_base order(2..17,18..31): mod_base = OTHER; note = Phosphorothioate linkage
  misc_feature 1..32: note = RM109742

SEQ ID NO: 968 - DNA, 23 bp, synthetic construct
  source 1..23: mol_type = other DNA
  misc_feature 17..19: note = DNA
  misc_feature order(1..16,20..23): note = RNA
  modified_base 18: mod_base = OTHER; note = DNA nucleotide carrying a 6-amino-5-nitro-3-yl-2(1H)-pyridone nucleobase
  modified_base 19: mod_base = OTHER; note = DNA nucleotide carrying a hypoxanthine nucleobase
  modified_base order(7..8,15,21..23): mod_base = OTHER; note = 2-Prime-Fluoro modified nucleoside
  modified_base order(1..6,9..14,16,20): mod_base = OTHER; note = 2-Prime-O-Methyl modified nucleoside
  modified_base order(1^2,19^20,22^23): mod_base = OTHER; note = (1,3-dimethylimidazolidin-2-ylidene) Phosphoramidate linkage
  modified_base order(2..19,20..22): mod_base = OTHER; note = Phosphorothioate linkage
  misc_feature 1..23: note = RM109743
ggggcatgatgccatacnntgcc

SEQ ID NO: 969 - DNA, 23 bp, synthetic construct
  source 1..23: mol_type = other DNA
  misc_feature 14..16: note = DNA
  misc_feature order(1..13,17..23): note = RNA
  modified_base 15: mod_base = OTHER; note = DNA nucleotide carrying a 6-amino-5-nitro-3-yl-2(1H)-pyridone nucleobase
  modified_base 16: mod_base = OTHER; note = DNA nucleotide carrying a hypoxanthine nucleobase
  modified_base order(4..5,12,18..20): mod_base = OTHER; note = 2-Prime-Fluoro modified nucleoside
  modified_base order(1..3,6..11,13,17,21..23): mod_base = OTHER; note = 2-Prime-O-Methyl modified nucleoside
  modified_base order(1^2,16^17,22^23): mod_base = OTHER; note = (1,3-dimethylimidazolidin-2-ylidene) Phosphoramidate linkage
  modified_base order(2..16,17..22): mod_base = OTHER; note = Phosphorothioate linkage
  misc_feature 1..23: note = RM109744
gcatgatgccatacnntgccacc

SEQ ID NO: 970 - DNA, 23 bp, synthetic construct
  source 1..23: mol_type = other DNA
  misc_feature 11..13: note = DNA
  misc_feature order(1..10,14..23): note = RNA
  modified_base 12: mod_base = OTHER; note = DNA nucleotide carrying a 6-amino-5-nitro-3-yl-2(1H)-pyridone nucleobase
  modified_base 13: mod_base = OTHER; note = DNA nucleotide carrying a hypoxanthine nucleobase
  modified_base order(1..2,9,15..17): mod_base = OTHER; note = 2-Prime-Fluoro modified nucleoside
  modified_base order(3..8,10,14,18..23): mod_base = OTHER; note = 2-Prime-O-Methyl modified nucleoside
  modified_base order(1^2,13^14,22^23): mod_base = OTHER; note = (1,3-dimethylimidazolidin-2-ylidene) Phosphoramidate linkage
  modified_base order(2..13,14..22): mod_base = OTHER; note = Phosphorothioate linkage
  misc_feature 1..23: note = RM109745
tgatgccatacnntgccaccagg

SEQ ID NO: 971 - DNA, 32 bp, synthetic construct; identical to SEQ ID NO: 186
  source 1..32: mol_type = other DNA
  misc_feature 24..26: note = DNA
  misc_feature order(1..23,27..32): note = RNA
  modified_base 25: mod_base = OTHER; note = DNA nucleotide carrying a 6-amino-5-nitro-3-yl-2(1H)-pyridone nucleobase
  modified_base 26: mod_base = OTHER; note = DNA nucleotide carrying a hypoxanthine nucleobase
  modified_base order(14..15,22,28..30): mod_base = OTHER; note = 2-Prime-Fluoro modified nucleoside
  modified_base order(1..13,16..21,23,27,31..32): mod_base = OTHER; note = 2-Prime-O-Methyl modified nucleoside
  modified_base order(1^2,26^27,31^32): mod_base = OTHER; note = (1,3-dimethylimidazolidin-2-ylidene) Phosphoramidate linkage
  modified_base order(2..26,27..31): mod_base = OTHER; note = Phosphorothioate linkage
  misc_feature 1..32: note = RM109746

SEQ ID NO: 972 - DNA, 32 bp, synthetic construct; identical to SEQ ID NO: 187
  source 1..32: mol_type = other DNA
  misc_feature 21..23: note = DNA
  misc_feature order(1..20,24..32): note = RNA
  modified_base 22: mod_base = OTHER; note = DNA nucleotide carrying a 6-amino-5-nitro-3-yl-2(1H)-pyridone nucleobase
  modified_base 23: mod_base = OTHER; note = DNA nucleotide carrying a hypoxanthine nucleobase
  modified_base order(11..12,19,25..27): mod_base = OTHER; note = 2-Prime-Fluoro modified nucleoside
  modified_base order(1..10,13..18,20,24,28..32): mod_base = OTHER; note = 2-Prime-O-Methyl modified nucleoside
  modified_base order(1^2,23^24,31^32): mod_base = OTHER; note = (1,3-dimethylimidazolidin-2-ylidene) Phosphoramidate linkage
  modified_base order(2..23,24..31): mod_base = OTHER; note = Phosphorothioate linkage
  misc_feature 1..32: note = RM109747

SEQ ID NO: 973 - DNA, 32 bp, synthetic construct; identical to SEQ ID NO: 5
  source 1..32: mol_type = other DNA
  misc_feature 18..20: note = DNA
  misc_feature order(1..17,21..32): note = RNA
  modified_base 19: mod_base = OTHER; note = DNA nucleotide carrying a 6-amino-5-nitro-3-yl-2(1H)-pyridone nucleobase
  modified_base 20: mod_base = OTHER; note = DNA nucleotide carrying a hypoxanthine nucleobase
  modified_base order(8..9,16,22..24): mod_base = OTHER; note = 2-Prime-Fluoro modified nucleoside
  modified_base order(1..7,10..15,17,21,25..32): mod_base = OTHER; note = 2-Prime-O-Methyl modified nucleoside
  modified_base order(1^2,20^21,31^32): mod_base = OTHER; note = (1,3-dimethylimidazolidin-2-ylidene) Phosphoramidate linkage
  modified_base order(2..20,21..31): mod_base = OTHER; note = Phosphorothioate linkage
  misc_feature 1..32: note = RM109748

SEQ ID NO: 974 - DNA, 32 bp, synthetic construct; identical to SEQ ID NO: 189
  source 1..32: mol_type = other DNA
  misc_feature 15..17: note = DNA
  misc_feature order(1..14,18..32): note = RNA
  modified_base 16: mod_base = OTHER; note = DNA nucleotide carrying a 6-amino-5-nitro-3-yl-2(1H)-pyridone nucleobase
  modified_base 17: mod_base = OTHER; note = DNA nucleotide carrying a hypoxanthine nucleobase
  modified_base order(5..6,13,19..21): mod_base = OTHER; note = 2-Prime-Fluoro modified nucleoside
  modified_base order(1..4,7..12,14,18,22..32): mod_base = OTHER; note = 2-Prime-O-Methyl modified nucleoside
  modified_base order(1^2,17^18,31^32): mod_base = OTHER; note = (1,3-dimethylimidazolidin-2-ylidene) Phosphoramidate linkage
  modified_base order(2..17,18..31): mod_base = OTHER; note = Phosphorothioate linkage
  misc_feature 1..32: note = RM109749

SEQ ID NO: 975 - DNA, 32 bp, synthetic construct; identical to SEQ ID NO: 190
  source 1..32: mol_type = other DNA
  misc_feature 12..14: note = DNA
  misc_feature order(1..11,15..32): note = RNA
  modified_base 13: mod_base = OTHER; note = DNA nucleotide carrying a 6-amino-5-nitro-3-yl-2(1H)-pyridone nucleobase
  modified_base 14: mod_base = OTHER; note = DNA nucleotide carrying a hypoxanthine nucleobase
  modified_base order(2..3,10,16..18): mod_base = OTHER; note = 2-Prime-Fluoro modified nucleoside
  modified_base order(1,4..9,11,15,19..32): mod_base = OTHER; note = 2-Prime-O-Methyl modified nucleoside
  modified_base order(1^2,14^15,31^32): mod_base = OTHER; note = (1,3-dimethylimidazolidin-2-ylidene) Phosphoramidate linkage
  modified_base order(2..14,15..31): mod_base = OTHER; note = Phosphorothioate linkage
  misc_feature 1..32: note = RM109750

SEQ ID NO: 976 - DNA, 23 bp, synthetic construct
  source 1..23: mol_type = other DNA
  misc_feature 8..10: note = DNA
  misc_feature order(1..7,11..23): note = RNA
  modified_base 9: mod_base = OTHER; note = DNA nucleotide carrying a 6-amino-5-nitro-3-yl-2(1H)-pyridone nucleobase
  modified_base 10: mod_base = OTHER; note = DNA nucleotide carrying a hypoxanthine nucleobase
  modified_base order(6..7,12,14,21..22): mod_base = OTHER; note = 2-Prime-Fluoro modified nucleoside
  modified_base order(1..5,11,13,15..20,23): mod_base = OTHER; note = 2-Prime-O-Methyl modified nucleoside
  modified_base order(1^2,10^11,22^23): mod_base = OTHER; note = (1,3-dimethylimidazolidin-2-ylidene) Phosphoramidate linkage
  modified_base order(2..10,11..22): mod_base = OTHER; note = Phosphorothioate linkage
  misc_feature 1..23: note = RM109751
tgccatacnntgccaccagggcg

SEQ ID NO: 977 - DNA, 23 bp, synthetic construct
  source 1..23: mol_type = other DNA
  misc_feature 5..7: note = DNA
  misc_feature order(1..4,8..23): note = RNA
  modified_base 6: mod_base = OTHER; note = DNA nucleotide carrying a 6-amino-5-nitro-3-yl-2(1H)-pyridone nucleobase
  modified_base 7: mod_base = OTHER; note = DNA nucleotide carrying a hypoxanthine nucleobase
  modified_base order(3..4,9,11,18..19): mod_base = OTHER; note = 2-Prime-Fluoro modified nucleoside
  modified_base order(1..2,8,10,12..17,20..23): mod_base = OTHER; note = 2-Prime-O-Methyl modified nucleoside
  modified_base order(1^2,7^8,22^23): mod_base = OTHER; note = (1,3-dimethylimidazolidin-2-ylidene) Phosphoramidate linkage
  modified_base order(2..7,8..22): mod_base = OTHER; note = Phosphorothioate linkage
  misc_feature 1..23: note = RM109752
catacnntgccaccagggcgatg

SEQ ID NO: 978 - DNA, 32 bp, synthetic construct; identical to SEQ ID NO: 5
  source 1..32: mol_type = other DNA
  misc_feature 18..20: note = DNA
  misc_feature order(1..17,21..32): note = RNA
  modified_base 19: mod_base = OTHER; note = DNA nucleotide carrying a 6-amino-5-nitro-3-yl-2(1H)-pyridone nucleobase
  modified_base 20: mod_base = OTHER; note = DNA nucleotide carrying a hypoxanthine nucleobase
  modified_base order(16..17,22,24,31..32): mod_base = OTHER; note = 2-Prime-Fluoro modified nucleoside
  modified_base order(1..15,21,23,25..30): mod_base = OTHER; note = 2-Prime-O-Methyl modified nucleoside
  modified_base order(1^2,20^21,31^32): mod_base = OTHER; note = (1,3-dimethylimidazolidin-2-ylidene) Phosphoramidate linkage
  modified_base order(2..20,21..31): mod_base = OTHER; note = Phosphorothioate linkage
  misc_feature 1..32: note = RM109753

SEQ ID NO: 979 - DNA, 32 bp, synthetic construct; identical to SEQ ID NO: 189
  source 1..32: mol_type = other DNA
  misc_feature 15..17: note = DNA
  misc_feature order(1..14,18..32): note = RNA
  modified_base 16: mod_base = OTHER; note = DNA nucleotide carrying a 6-amino-5-nitro-3-yl-2(1H)-pyridone nucleobase
  modified_base 17: mod_base = OTHER; note = DNA nucleotide carrying a hypoxanthine nucleobase
  modified_base order(13..14,19,21,28..29): mod_base = OTHER; note = 2-Prime-Fluoro modified nucleoside
  modified_base order(1..12,18,20,22..27,30..32): mod_base = OTHER; note = 2-Prime-O-Methyl modified nucleoside
  modified_base order(1^2,17^18,31^32): mod_base = OTHER; note = (1,3-dimethylimidazolidin-2-ylidene) Phosphoramidate linkage
  modified_base order(2..17,18..31): mod_base = OTHER; note = Phosphorothioate linkage
  misc_feature 1..32: note = RM109754

SEQ ID NO: 980 - DNA, 32 bp, synthetic construct; identical to SEQ ID NO: 190
  source 1..32: mol_type = other DNA
  misc_feature 12..14: note = DNA
  misc_feature order(1..11,15..32): note = RNA
  modified_base 13: mod_base = OTHER; note = DNA nucleotide carrying a 6-amino-5-nitro-3-yl-2(1H)-pyridone nucleobase
  modified_base 14: mod_base = OTHER; note = DNA nucleotide carrying a hypoxanthine nucleobase
  modified_base order(10..11,16,18,25..26): mod_base = OTHER; note = 2-Prime-Fluoro modified nucleoside
  modified_base order(1..9,15,17,19..24,27..32): mod_base = OTHER; note = 2-Prime-O-Methyl modified nucleoside
  modified_base order(1^2,14^15,31^32): mod_base = OTHER; note = (1,3-dimethylimidazolidin-2-ylidene) Phosphoramidate linkage
  modified_base order(2..14,15..31): mod_base = OTHER; note = Phosphorothioate linkage
  misc_feature 1..32: note = RM109755

SEQ ID NO: 981 - DNA, 32 bp, synthetic construct; identical to SEQ ID NO: 191
  source 1..32: mol_type = other DNA
  misc_feature 9..11: note = DNA
  misc_feature order(1..8,12..32): note = RNA
  modified_base 10: mod_base = OTHER; note = DNA nucleotide carrying a 6-amino-5-nitro-3-yl-2(1H)-pyridone nucleobase
  modified_base 11: mod_base = OTHER; note = DNA nucleotide carrying a hypoxanthine nucleobase
  modified_base order(7..8,13,15,22..23): mod_base = OTHER; note = 2-Prime-Fluoro modified nucleoside
  modified_base order(1..6,12,14,16..21,24..32): mod_base = OTHER; note = 2-Prime-O-Methyl modified nucleoside
  modified_base order(1^2,11^12,31^32): mod_base = OTHER; note = (1,3-dimethylimidazolidin-2-ylidene) Phosphoramidate linkage
  modified_base order(2..11,12..31): mod_base = OTHER; note = Phosphorothioate linkage
  misc_feature 1..32: note = RM109756

SEQ ID NO: 982 - DNA, 32 bp, synthetic construct; identical to SEQ ID NO: 192
  source 1..32: mol_type = other DNA
  misc_feature 6..8: note = DNA
  misc_feature order(1..5,9..32): note = RNA
  modified_base 7: mod_base = OTHER; note = DNA nucleotide carrying a 6-amino-5-nitro-3-yl-2(1H)-pyridone nucleobase
  modified_base 8: mod_base = OTHER; note = DNA nucleotide carrying a hypoxanthine nucleobase
  modified_base order(4..5,10,12,19..20): mod_base = OTHER; note = 2-Prime-Fluoro modified nucleoside
  modified_base order(1..3,9,11,13..18,21..32): mod_base = OTHER; note = 2-Prime-O-Methyl modified nucleoside
  modified_base order(1^2,8^9,31^32): mod_base = OTHER; note = (1,3-dimethylimidazolidin-2-ylidene) Phosphoramidate linkage
  modified_base order(2..8,9..31): mod_base = OTHER; note = Phosphorothioate linkage
  misc_feature 1..32: note = RM109757

SEQ ID NO: 983 - DNA, 32 bp, synthetic construct; identical to SEQ ID NO: 185
  source 1..32: mol_type = other DNA
  misc_feature 27..29: note = DNA
  misc_feature order(1..26,30..32): note = RNA
  modified_base 28: mod_base = OTHER; note = DNA nucleotide carrying a 6-amino-5-nitro-3-yl-2(1H)-pyridone nucleobase
  modified_base 29: mod_base = OTHER; note = DNA nucleotide carrying a hypoxanthine nucleobase
  modified_base order(25,31..32): mod_base = OTHER; note = 2-Prime-Fluoro modified nucleoside
  modified_base order(1..24,26,30): mod_base = OTHER; note = 2-Prime-O-Methyl modified nucleoside
  modified_base order(1^2,29^30,31^32): mod_base = OTHER; note = (1,3-dimethylimidazolidin-2-ylidene) Phosphoramidate linkage
  modified_base order(2..29,30^31): mod_base = OTHER; note = Phosphorothioate linkage
  misc_feature 1..32: note = RM109758

SEQ ID NO: 984 - DNA, 32 bp, synthetic construct; identical to SEQ ID NO: 186
  source 1..32: mol_type = other DNA
  misc_feature 24..26: note = DNA
  misc_feature order(1..23,27..32): note = RNA
  modified_base 25: mod_base = OTHER; note = DNA nucleotide carrying a 6-amino-5-nitro-3-yl-2(1H)-pyridone nucleobase
  modified_base 26: mod_base = OTHER; note = DNA nucleotide carrying a hypoxanthine nucleobase
  modified_base order(22,28..29): mod_base = OTHER; note = 2-Prime-Fluoro modified nucleoside
  modified_base order(1..21,23,27,30..32): mod_base = OTHER; note = 2-Prime-O-Methyl modified nucleoside
  modified_base order(1^2,26^27,31^32): mod_base = OTHER; note = (1,3-dimethylimidazolidin-2-ylidene) Phosphoramidate linkage
  modified_base order(2..26,27..31): mod_base = OTHER; note = Phosphorothioate linkage
  misc_feature 1..32: note = RM109759

SEQ ID NO: 985 - DNA, 32 bp, synthetic construct; identical to SEQ ID NO: 187
  source 1..32: mol_type = other DNA
  misc_feature 21..23: note = DNA
  misc_feature order(1..20,24..32): note = RNA
  modified_base 22: mod_base = OTHER; note = DNA nucleotide carrying a 6-amino-5-nitro-3-yl-2(1H)-pyridone nucleobase
  modified_base 23: mod_base = OTHER; note = DNA nucleotide carrying a hypoxanthine nucleobase
  modified_base order(19,25..26): mod_base = OTHER; note = 2-Prime-Fluoro modified nucleoside
  modified_base order(1..18,20,24,27..32): mod_base = OTHER; note = 2-Prime-O-Methyl modified nucleoside
  modified_base order(1^2,23^24,31^32): mod_base = OTHER; note = (1,3-dimethylimidazolidin-2-ylidene) Phosphoramidate linkage
  modified_base order(2..23,24..31): mod_base = OTHER; note = Phosphorothioate linkage
  misc_feature 1..32: note = RM109760

SEQ ID NO: 986 - DNA, 32 bp, synthetic construct; identical to SEQ ID NO: 5
  source 1..32: mol_type = other DNA
  misc_feature 18..20: note = DNA
  misc_feature order(1..17,21..32): note = RNA
  modified_base 19: mod_base = OTHER; note = DNA nucleotide carrying a 6-amino-5-nitro-3-yl-2(1H)-pyridone nucleobase
  modified_base 20: mod_base = OTHER; note = DNA nucleotide carrying a hypoxanthine nucleobase
  modified_base order(16,22..23): mod_base = OTHER; note = 2-Prime-Fluoro modified nucleoside
  modified_base order(1..15,17,21,24..32): mod_base = OTHER; note = 2-Prime-O-Methyl modified nucleoside
  modified_base order(1^2,20^21,31^32): mod_base = OTHER; note = (1,3-dimethylimidazolidin-2-ylidene) Phosphoramidate linkage
  modified_base order(2..20,21..31): mod_base = OTHER; note = Phosphorothioate linkage
  misc_feature 1..32: note = RM109761

SEQ ID NO: 987 - DNA, 32 bp, synthetic construct; identical to SEQ ID NO: 189
  source 1..32: mol_type = other DNA
  misc_feature 15..17: note = DNA
  misc_feature order(1..14,18..32): note = RNA
  modified_base 16: mod_base = OTHER; note = DNA nucleotide carrying a 6-amino-5-nitro-3-yl-2(1H)-pyridone nucleobase
  modified_base 17: mod_base = OTHER; note = DNA nucleotide carrying a hypoxanthine nucleobase
  modified_base order(13,19..20): mod_base = OTHER; note = 2-Prime-Fluoro modified nucleoside
  modified_base order(1..12,14,18,21..32): mod_base = OTHER; note = 2-Prime-O-Methyl modified nucleoside
  modified_base order(1^2,17^18,31^32): mod_base = OTHER; note = (1,3-dimethylimidazolidin-2-ylidene) Phosphoramidate linkage
  modified_base order(2..17,18..31): mod_base = OTHER; note = Phosphorothioate linkage
  misc_feature 1..32: note = RM109762

SEQ ID NO: 988 - DNA, 32 bp, synthetic construct; identical to SEQ ID NO: 190
  source 1..32: mol_type = other DNA
  misc_feature 12..14: note = DNA
  misc_feature order(1..11,15..32): note = RNA
  modified_base 13: mod_base = OTHER; note = DNA nucleotide carrying a 6-amino-5-nitro-3-yl-2(1H)-pyridone nucleobase
  modified_base 14: mod_base = OTHER; note = DNA nucleotide carrying a hypoxanthine nucleobase
  modified_base order(10,16..17): mod_base = OTHER; note = 2-Prime-Fluoro modified nucleoside
  modified_base order(1..9,11,15,18..32): mod_base = OTHER; note = 2-Prime-O-Methyl modified nucleoside
  modified_base order(1^2,14^15,31^32): mod_base = OTHER; note = (1,3-dimethylimidazolidin-2-ylidene) Phosphoramidate linkage
  modified_base order(2..14,15..31): mod_base = OTHER; note = Phosphorothioate linkage
  misc_feature 1..32: note = RM109763

SEQ ID NO: 989 - DNA, 32 bp, synthetic construct; identical to SEQ ID NO: 191
  source 1..32: mol_type = other DNA
  misc_feature 9..11: note = DNA
  misc_feature order(1..8,12..32): note = RNA
  modified_base 10: mod_base = OTHER; note = DNA nucleotide carrying a 6-amino-5-nitro-3-yl-2(1H)-pyridone nucleobase
  modified_base 11: mod_base = OTHER; note = DNA nucleotide carrying a hypoxanthine nucleobase
  modified_base order(7,13..14): mod_base = OTHER; note = 2-Prime-Fluoro modified nucleoside
  modified_base order(1..6,8,12,15..32): mod_base = OTHER; note = 2-Prime-O-Methyl modified nucleoside
  modified_base order(1^2,11^12,31^32): mod_base = OTHER; note = (1,3-dimethylimidazolidin-2-ylidene) Phosphoramidate linkage
  modified_base order(2..11,12..31): mod_base = OTHER; note = Phosphorothioate linkage
  misc_feature 1..32: note = RM109764

SEQ ID NO: 990 - DNA, 32 bp, synthetic construct; identical to SEQ ID NO: 192
  source 1..32: mol_type = other DNA
  misc_feature 6..8: note = DNA
  misc_feature order(1..5,9..32): note = RNA
  modified_base 7: mod_base = OTHER; note = DNA nucleotide carrying a 6-amino-5-nitro-3-yl-2(1H)-pyridone nucleobase
  modified_base 8: mod_base = OTHER; note = DNA nucleotide carrying a hypoxanthine nucleobase
  modified_base order(4,10..11): mod_base = OTHER; note = 2-Prime-Fluoro modified nucleoside
  modified_base order(1..3,5,9,12..32): mod_base = OTHER; note = 2-Prime-O-Methyl modified nucleoside
  modified_base order(1^2,8^9,31^32): mod_base = OTHER; note = (1,3-dimethylimidazolidin-2-ylidene) Phosphoramidate linkage
  modified_base order(2..8,9..31): mod_base = OTHER; note = Phosphorothioate linkage
  misc_feature 1..32: note = RM109765

SEQ ID NO: 991 - DNA, 32 bp, synthetic construct; identical to SEQ ID NO: 186
  source 1..32: mol_type = other DNA
  misc_feature 24..26: note = DNA
  misc_feature order(1..23,27..32): note = RNA
  modified_base 25: mod_base = OTHER; note = DNA nucleotide carrying a 6-amino-5-nitro-3-yl-2(1H)-pyridone nucleobase
  modified_base 26: mod_base = OTHER; note = DNA nucleotide carrying a hypoxanthine nucleobase
  modified_base order(23,28,30): mod_base = OTHER; note = 2-Prime-Fluoro modified nucleoside
  modified_base order(1..22,27,29,31..32): mod_base = OTHER; note = 2-Prime-O-Methyl modified nucleoside
  modified_base order(1^2,26^27,31^32): mod_base = OTHER; note = (1,3-dimethylimidazolidin-2-ylidene) Phosphoramidate linkage
  modified_base order(2..26,27..31): mod_base = OTHER; note = Phosphorothioate linkage
  misc_feature 1..32: note = RM109766

SEQ ID NO: 992 - DNA, 32 bp, synthetic construct; identical to SEQ ID NO: 187
  source 1..32: mol_type = other DNA
  misc_feature 21..23: note = DNA
  misc_feature order(1..20,24..32): note = RNA
  modified_base 22: mod_base = OTHER; note = DNA nucleotide carrying a 6-amino-5-nitro-3-yl-2(1H)-pyridone nucleobase
  modified_base 23: mod_base = OTHER; note = DNA nucleotide carrying a hypoxanthine nucleobase
  modified_base order(20,25,27): mod_base = OTHER; note = 2-Prime-Fluoro modified nucleoside
  modified_base order(1..19,24,26,28..32): mod_base = OTHER; note = 2-Prime-O-Methyl modified nucleoside
  modified_base order(1^2,23^24,31^32): mod_base = OTHER; note = (1,3-dimethylimidazolidin-2-ylidene) Phosphoramidate linkage
  modified_base order(2..23,24..31): mod_base = OTHER; note = Phosphorothioate linkage
  misc_feature 1..32: note = RM109767

SEQ ID NO: 993 - DNA, 32 bp, synthetic construct; identical to SEQ ID NO: 5
  source 1..32: mol_type = other DNA
  misc_feature 18..20: note = DNA
  misc_feature order(1..17,21..32): note = RNA
  modified_base 19: mod_base = OTHER; note = DNA nucleotide carrying a 6-amino-5-nitro-3-yl-2(1H)-pyridone nucleobase
  modified_base 20: mod_base = OTHER; note = DNA nucleotide carrying a hypoxanthine nucleobase
  modified_base order(17,22,24): mod_base = OTHER; note = 2-Prime-Fluoro modified nucleoside
  modified_base order(1..16,21,23,25..32): mod_base = OTHER; note = 2-Prime-O-Methyl modified nucleoside
  modified_base order(1^2,20^21,31^32): mod_base = OTHER; note = (1,3-dimethylimidazolidin-2-ylidene) Phosphoramidate linkage
  modified_base order(2..20,21..31): mod_base = OTHER; note = Phosphorothioate linkage
  misc_feature 1..32: note = RM109768

SEQ ID NO: 994 - DNA, 32 bp, synthetic construct; identical to SEQ ID NO: 189
  source 1..32: mol_type = other DNA
  misc_feature 15..17: note = DNA
  misc_feature order(1..14,18..32): note = RNA
  modified_base 16: mod_base = OTHER; note = DNA nucleotide carrying a 6-amino-5-nitro-3-yl-2(1H)-pyridone nucleobase
  modified_base 17: mod_base = OTHER; note = DNA nucleotide carrying a hypoxanthine nucleobase
  modified_base order(14,19,21): mod_base = OTHER; note = 2-Prime-Fluoro modified nucleoside
  modified_base order(1..13,18,20,22..32): mod_base = OTHER; note = 2-Prime-O-Methyl modified nucleoside
  modified_base order(1^2,17^18,31^32): mod_base = OTHER; note = (1,3-dimethylimidazolidin-2-ylidene) Phosphoramidate linkage
  modified_base order(2..17,18..31): mod_base = OTHER; note = Phosphorothioate linkage
  misc_feature 1..32: note = RM109769

SEQ ID NO: 995 - DNA, 32 bp, synthetic construct; identical to SEQ ID NO: 190
  source 1..32: mol_type = other DNA
  misc_feature 12..14: note = DNA
  misc_feature order(1..11,15..32): note = RNA
  modified_base 13: mod_base = OTHER; note = DNA nucleotide carrying a 6-amino-5-nitro-3-yl-2(1H)-pyridone nucleobase
  modified_base 14: mod_base = OTHER; note = DNA nucleotide carrying a hypoxanthine nucleobase
  modified_base order(11,16,18): mod_base = OTHER; note = 2-Prime-Fluoro modified nucleoside
  modified_base order(1..10,15,17,19..32): mod_base = OTHER; note = 2-Prime-O-Methyl modified nucleoside
  modified_base order(1^2,14^15,31^32): mod_base = OTHER; note = (1,3-dimethylimidazolidin-2-ylidene) Phosphoramidate linkage
  modified_base order(2..14,15..31): mod_base = OTHER; note = Phosphorothioate linkage
  misc_feature 1..32: note = RM109770

SEQ ID NO: 996 - DNA, 32 bp, synthetic construct; identical to SEQ ID NO: 191
  source 1..32: mol_type = other DNA
  misc_feature 9..11: note = DNA
  misc_feature order(1..8,12..32): note = RNA
  modified_base 10: mod_base = OTHER; note = DNA nucleotide carrying a 6-amino-5-nitro-3-yl-2(1H)-pyridone nucleobase
  modified_base 11: mod_base = OTHER; note = DNA nucleotide carrying a hypoxanthine nucleobase
  modified_base order(8,13,15): mod_base = OTHER; note = 2-Prime-Fluoro modified nucleoside
  modified_base order(1..7,12,14,16..32): mod_base = OTHER; note = 2-Prime-O-Methyl modified nucleoside
  modified_base order(1^2,11^12,31^32): mod_base = OTHER; note = (1,3-dimethylimidazolidin-2-ylidene) Phosphoramidate linkage
  modified_base order(2..11,12..31): mod_base = OTHER; note = Phosphorothioate linkage
  misc_feature 1..32: note = RM109771

SEQ ID NO: 997 - DNA, 32 bp, synthetic construct; identical to SEQ ID NO: 192
  source 1..32: mol_type = other DNA
  misc_feature 6..8: note = DNA
  misc_feature order(1..5,9..32): note = RNA
  modified_base 7: mod_base = OTHER; note = DNA nucleotide carrying a 6-amino-5-nitro-3-yl-2(1H)-pyridone nucleobase
  modified_base 8: mod_base = OTHER; note = DNA nucleotide carrying a hypoxanthine nucleobase
  modified_base order(5,10,12): mod_base = OTHER; note = 2-Prime-Fluoro modified nucleoside
  modified_base order(1..4,9,11,13..32): mod_base = OTHER; note = 2-Prime-O-Methyl modified nucleoside
  modified_base order(1^2,8^9,31^32): mod_base = OTHER; note = (1,3-dimethylimidazolidin-2-ylidene) Phosphoramidate linkage
  modified_base order(2..8,9..31): mod_base = OTHER; note = Phosphorothioate linkage
  misc_feature 1..32: note = RM109772

SEQ ID NO: 998 - DNA, 32 bp, synthetic construct; identical to SEQ ID NO: 5
  source 1..32: mol_type = other DNA
  misc_feature 18..20: note = DNA
  misc_feature order(1..17,21..32): note = RNA
  modified_base 19: mod_base = OTHER; note = DNA nucleotide carrying a 6-amino-5-nitro-3-yl-2(1H)-pyridone nucleobase
  modified_base 20: mod_base = OTHER; note = DNA nucleotide carrying a hypoxanthine nucleobase
  modified_base order(2,5,8,10,17,22,25,27,32): mod_base = OTHER; note = 2-Prime-Fluoro modified nucleoside
  modified_base order(1,3..4,6..7,9,11..16,21,23..24,26,28..31): mod_base = OTHER; note = 2-Prime-O-Methyl modified nucleoside
  modified_base order(1^2,20^21,31^32): mod_base = OTHER; note = (1,3-dimethylimidazolidin-2-ylidene) Phosphoramidate linkage
  modified_base order(2..20,21..31): mod_base = OTHER; note = Phosphorothioate linkage
  misc_feature 1..32: note = RM109773

SEQ ID NO: 999 - DNA, 32 bp, synthetic construct; identical to SEQ ID NO: 190
  source 1..32: mol_type = other DNA
  misc_feature 12..14: note = DNA
  misc_feature order(1..11,15..32): note = RNA
  modified_base 13: mod_base = OTHER; note = DNA nucleotide carrying a 6-amino-5-nitro-3-yl-2(1H)-pyridone nucleobase
  modified_base 14: mod_base = OTHER; note = DNA nucleotide carrying a hypoxanthine nucleobase
  modified_base order(2,7,9,16..17,24,26,29,32): mod_base = OTHER; note = 2-Prime-Fluoro modified nucleoside
  modified_base order(1,3..6,8,10..11,15,18..23,25,27..28,30..31): mod_base = OTHER; note = 2-Prime-O-Methyl modified nucleoside
  modified_base order(1^2,14^15,31^32): mod_base = OTHER; note = (1,3-dimethylimidazolidin-2-ylidene) Phosphoramidate linkage
  modified_base order(2..14,15..31): mod_base = OTHER; note = Phosphorothioate linkage
  misc_feature 1..32: note = RM109774

SEQ ID NO: 1000 - DNA, 23 bp, synthetic construct
  source 1..23: mol_type = other DNA
  misc_feature 14..16: note = DNA
  misc_feature order(1..13,17..23): note = RNA
  modified_base 15: mod_base = OTHER; note = DNA nucleotide carrying a 6-amino-5-nitro-3-yl-2(1H)-pyridone nucleobase
  modified_base 16: mod_base = OTHER; note = DNA nucleotide carrying a hypoxanthine nucleobase
  modified_base order(1,4,6,13,18,21): mod_base = OTHER; note = 2-Prime-Fluoro modified nucleoside
  modified_base order(2..3,5,7..12,17,19..20,22..23): mod_base = OTHER; note = 2-Prime-O-Methyl modified nucleoside
  modified_base order(1^2,16^17,22^23): mod_base = OTHER; note = (1,3-dimethylimidazolidin-2-ylidene) Phosphoramidate linkage
  modified_base order(2..16,17..22): mod_base = OTHER; note = Phosphorothioate linkage
  misc_feature 1..23: note = RM109775
gcatgatgccatacnntgccacc

SEQ ID NO: 1001 - DNA, 32 bp, synthetic construct; identical to SEQ ID NO: 186
  source 1..32: mol_type = other DNA
  misc_feature 24..26: note = DNA
  misc_feature order(1..23,27..32): note = RNA
  modified_base 25: mod_base = OTHER; note = DNA nucleotide carrying a 6-amino-5-nitro-3-yl-2(1H)-pyridone nucleobase
  modified_base 26: mod_base = OTHER; note = DNA nucleotide carrying a hypoxanthine nucleobase
  modified_base order(11,14,16,23,28,31): mod_base = OTHER; note = 2-Prime-Fluoro modified nucleoside
  modified_base order(1..10,12..13,15,17..22,27,29..30,32): mod_base = OTHER; note = 2-Prime-O-Methyl modified nucleoside
  modified_base order(1^2,26^27,31^32): mod_base = OTHER; note = (1,3-dimethylimidazolidin-2-ylidene) Phosphoramidate linkage
  modified_base order(2..26,27..31): mod_base = OTHER; note = Phosphorothioate linkage
  misc_feature 1..32: note = RM109776

SEQ ID NO: 1002 - DNA, 32 bp, synthetic construct; identical to SEQ ID NO: 187
  source 1..32: mol_type = other DNA
  misc_feature 21..23: note = DNA
  misc_feature order(1..20,24..32): note = RNA
  modified_base 22: mod_base = OTHER; note = DNA nucleotide carrying a 6-amino-5-nitro-3-yl-2(1H)-pyridone nucleobase
  modified_base 23: mod_base = OTHER; note = DNA nucleotide carrying a hypoxanthine nucleobase
  modified_base order(8,11,13,20,25,28): mod_base = OTHER; note = 2-Prime-Fluoro modified nucleoside
  modified_base order(1..7,9..10,12,14..19,24,26..27,29..32): mod_base = OTHER; note = 2-Prime-O-Methyl modified nucleoside
  modified_base order(1^2,23^24,31^32): mod_base = OTHER; note = (1,3-dimethylimidazolidin-2-ylidene) Phosphoramidate linkage
  modified_base order(2..23,24..31): mod_base = OTHER; note = Phosphorothioate linkage
  misc_feature 1..32: note = RM109777

SEQ ID NO: 1003 - DNA, 32 bp, synthetic construct; identical to SEQ ID NO: 5
  source 1..32: mol_type = other DNA
  misc_feature 18..20: note = DNA
  misc_feature order(1..17,21..32): note = RNA
  modified_base 19: mod_base = OTHER; note = DNA nucleotide carrying a 6-amino-5-nitro-3-yl-2(1H)-pyridone nucleobase
  modified_base 20: mod_base = OTHER; note = DNA nucleotide carrying a hypoxanthine nucleobase
  modified_base order(5,8,10,17,22,25): mod_base = OTHER; note = 2-Prime-Fluoro modified nucleoside
  modified_base order(1..4,6..7,9,11..16,21,23..24,26..32): mod_base = OTHER; note = 2-Prime-O-Methyl modified nucleoside
  modified_base order(1^2,20^21,31^32): mod_base = OTHER; note = (1,3-dimethylimidazolidin-2-ylidene) Phosphoramidate linkage
  modified_base order(2..20,21..31): mod_base = OTHER; note = Phosphorothioate linkage
  misc_feature 1..32: note = RM109778

SEQ ID NO: 1004 - DNA, 32 bp, synthetic construct; identical to SEQ ID NO: 189
  source 1..32: mol_type = other DNA
  misc_feature 15..17: note = DNA
  misc_feature order(1..14,18..32): note = RNA
  modified_base 16: mod_base = OTHER; note = DNA nucleotide carrying a 6-amino-5-nitro-3-yl-2(1H)-pyridone nucleobase
  modified_base 17: mod_base = OTHER; note = DNA nucleotide carrying a hypoxanthine nucleobase
  modified_base order(2,5,7,14,19,22): mod_base = OTHER; note = 2-Prime-Fluoro modified nucleoside
  modified_base order(1,3..4,6,8..13,18,20..21,23..32): mod_base = OTHER; note = 2-Prime-O-Methyl modified nucleoside
  modified_base order(1^2,17^18,31^32): mod_base = OTHER; note = (1,3-dimethylimidazolidin-2-ylidene) Phosphoramidate linkage
  modified_base order(2..17,18..31): mod_base = OTHER; note = Phosphorothioate linkage
  misc_feature 1..32: note = RM109779

SEQ ID NO: 1005 - DNA, 23 bp, synthetic construct
  source 1..23: mol_type = other DNA
  misc_feature 5..7: note = DNA
  misc_feature order(1..4,8..23): note = RNA
  modified_base 6: mod_base = OTHER; note = DNA nucleotide carrying a 6-amino-5-nitro-3-yl-2(1H)-pyridone nucleobase
  modified_base 7: mod_base = OTHER; note = DNA nucleotide carrying a hypoxanthine nucleobase
  modified_base order(2,9..10,17,19,22): mod_base = OTHER; note = 2-Prime-Fluoro modified nucleoside
  modified_base order(1,3..4,8,11..16,18,20..21,23): mod_base = OTHER; note = 2-Prime-O-Methyl modified nucleoside
  modified_base order(1^2,7^8,22^23): mod_base = OTHER; note = (1,3-dimethylimidazolidin-2-ylidene) Phosphoramidate linkage
  modified_base order(2..7,8..22): mod_base = OTHER; note = Phosphorothioate linkage
  misc_feature 1..23: note = RM109780
catacnntgccaccagggcgatg

SEQ ID NO: 1006 - DNA, 32 bp, synthetic construct; identical to SEQ ID NO: 189
  source 1..32: mol_type = other DNA
  misc_feature 15..17: note = DNA
  misc_feature order(1..14,18..32): note = RNA
  modified_base 16: mod_base = OTHER; note = DNA nucleotide carrying a 6-amino-5-nitro-3-yl-2(1H)-pyridone nucleobase
  modified_base 17: mod_base = OTHER; note = DNA nucleotide carrying a hypoxanthine nucleobase
  modified_base order(12,19..20,27,29,32): mod_base = OTHER; note = 2-Prime-Fluoro modified nucleoside
  modified_base order(1..11,13..14,18,21..26,28,30..31): mod_base = OTHER; note = 2-Prime-O-Methyl modified nucleoside
  modified_base order(1^2,17^18,31^32): mod_base = OTHER; note = (1,3-dimethylimidazolidin-2-ylidene) Phosphoramidate linkage
  modified_base order(2..17,18..31): mod_base = OTHER; note = Phosphorothioate linkage
  misc_feature 1..32: note = RM109781

SEQ ID NO: 1007 - DNA, 32 bp, synthetic construct; identical to SEQ ID NO: 190
  source 1..32: mol_type = other DNA
  misc_feature 12..14: note = DNA
  misc_feature order(1..11,15..32): note = RNA
  modified_base 13: mod_base = OTHER; note = DNA nucleotide carrying a 6-amino-5-nitro-3-yl-2(1H)-pyridone nucleobase
  modified_base 14: mod_base = OTHER; note = DNA nucleotide carrying a hypoxanthine nucleobase
  modified_base order(9,16..17,24,26,29): mod_base = OTHER; note = 2-Prime-Fluoro modified nucleoside
  modified_base order(1..8,10..11,15,18..23,25,27..28,30..32): mod_base = OTHER; note = 2-Prime-O-Methyl modified nucleoside
  modified_base order(1^2,14^15,31^32): mod_base = OTHER; note = (1,3-dimethylimidazolidin-2-ylidene) Phosphoramidate linkage
  modified_base order(2..14,15..31): mod_base = OTHER; note = Phosphorothioate linkage
  misc_feature 1..32: note = RM109782

SEQ ID NO: 1008 - DNA, 32 bp, synthetic construct; identical to SEQ ID NO: 191
  source 1..32: mol_type = other DNA
  misc_feature 9..11: note = DNA
  misc_feature order(1..8,12..32): note = RNA
  modified_base 10: mod_base = OTHER; note = DNA nucleotide carrying a 6-amino-5-nitro-3-yl-2(1H)-pyridone nucleobase
  modified_base 11: mod_base = OTHER; note = DNA nucleotide carrying a hypoxanthine nucleobase
  modified_base order(6,13..14,21,23,26): mod_base = OTHER; note = 2-Prime-Fluoro modified nucleoside
  modified_base order(1..5,7..8,12,15..20,22,24..25,27..32): mod_base = OTHER; note = 2-Prime-O-Methyl modified nucleoside
  modified_base order(1^2,11^12,31^32): mod_base = OTHER; note = (1,3-dimethylimidazolidin-2-ylidene) Phosphoramidate linkage
  modified_base order(2..11,12..31): mod_base = OTHER; note = Phosphorothioate linkage
  misc_feature 1..32: note = RM109783

SEQ ID NO: 1009 - DNA, 32 bp, synthetic construct; identical to SEQ ID NO: 192
  source 1..32: mol_type = other DNA
  misc_feature 6..8: note = DNA
  misc_feature order(1..5,9..32): note = RNA
  modified_base 7: mod_base = OTHER; note = DNA nucleotide carrying a 6-amino-5-nitro-3-yl-2(1H)-pyridone nucleobase
  modified_base 8: mod_base = OTHER; note = DNA nucleotide carrying a hypoxanthine nucleobase
  modified_base order(3,10..11,18,20,23): mod_base = OTHER; note = 2-Prime-Fluoro modified nucleoside
  modified_base order(1..2,4..5,9,12..17,19,21..22,24..32): mod_base = OTHER; note = 2-Prime-O-Methyl modified nucleoside
  modified_base order(1^2,8^9,31^32): mod_base = OTHER; note = (1,3-dimethylimidazolidin-2-ylidene) Phosphoramidate linkage
  modified_base order(2..8,9..31): mod_base = OTHER; note = Phosphorothioate linkage
  misc_feature 1..32: note = RM109784

SEQ ID NO: 1010 - DNA, 32 bp, synthetic construct; identical to SEQ ID NO: 186
  source 1..32: mol_type = other DNA
  misc_feature 24..26: note = DNA
  misc_feature order(1..23,27..32): note = RNA
  modified_base 25: mod_base = OTHER; note = DNA nucleotide carrying a 6-amino-5-nitro-3-yl-2(1H)-pyridone nucleobase
  modified_base 26: mod_base = OTHER; note = DNA nucleotide carrying a hypoxanthine nucleobase
  modified_base order(23,28,31): mod_base = OTHER; note = 2-Prime-Fluoro modified nucleoside
  modified_base order(1..22,27,29..30,32): mod_base = OTHER; note = 2-Prime-O-Methyl modified nucleoside
  modified_base order(1^2,26^27,31^32): mod_base = OTHER; note = (1,3-dimethylimidazolidin-2-ylidene) Phosphoramidate linkage
  modified_base order(2..26,27..31): mod_base = OTHER; note = Phosphorothioate linkage
  misc_feature 1..32: note = RM109785

SEQ ID NO: 1011 - DNA, 32 bp, synthetic construct; identical to SEQ ID NO: 187
  source 1..32: mol_type = other DNA
  misc_feature 21..23: note = DNA
  misc_feature order(1..20,24..32): note = RNA
  modified_base 22: mod_base = OTHER; note = DNA nucleotide carrying a 6-amino-5-nitro-3-yl-2(1H)-pyridone nucleobase
  modified_base 23: mod_base = OTHER; note = DNA nucleotide carrying a hypoxanthine nucleobase
  modified_base order(20,25,28): mod_base = OTHER; note = 2-Prime-Fluoro modified nucleoside
  modified_base order(1..19,24,26..27,29..32): mod_base = OTHER; note = 2-Prime-O-Methyl modified nucleoside
  modified_base order(1^2,23^24,31^32): mod_base = OTHER; note = (1,3-dimethylimidazolidin-2-ylidene) Phosphoramidate linkage
  modified_base order(2..23,24..31): mod_base = OTHER; note = Phosphorothioate linkage
  misc_feature 1..32: note = RM109786

SEQ ID NO: 1012 - DNA, 32 bp, synthetic construct; identical to SEQ ID NO: 5
  source 1..32: mol_type = other DNA
  misc_feature 18..20: note = DNA
  misc_feature order(1..17,21..32): note = RNA
  modified_base 19: mod_base = OTHER; note = DNA nucleotide carrying a 6-amino-5-nitro-3-yl-2(1H)-pyridone nucleobase
  modified_base 20: mod_base = OTHER; note = DNA nucleotide carrying a hypoxanthine nucleobase
  modified_base order(17,22,25): mod_base = OTHER; note = 2-Prime-Fluoro modified nucleoside
  modified_base order(1..16,21,23..24,26..32): mod_base = OTHER; note = 2-Prime-O-Methyl modified nucleoside
  modified_base order(1^2,20^21,31^32): mod_base = OTHER; note = (1,3-dimethylimidazolidin-2-ylidene) Phosphoramidate linkage
  modified_base order(2..20,21..31): mod_base = OTHER; note = Phosphorothioate linkage
  misc_feature 1..32: note = RM109787

SEQ ID NO: 1013 - DNA, 32 bp, synthetic construct; identical to SEQ ID NO: 189
  source 1..32: mol_type = other DNA
  misc_feature 15..17: note = DNA
  misc_feature order(1..14,18..32): note = RNA
  modified_base 16: mod_base = OTHER; note = DNA nucleotide carrying a 6-amino-5-nitro-3-yl-2(1H)-pyridone nucleobase
  modified_base 17: mod_base = OTHER; note = DNA nucleotide carrying a hypoxanthine nucleobase
  modified_base order(14,19,22): mod_base = OTHER; note = 2-Prime-Fluoro modified nucleoside
  modified_base order(1..13,18,20..21,23..32): mod_base = OTHER; note = 2-Prime-O-Methyl modified nucleoside
  modified_base order(1^2,17^18,31^32): mod_base = OTHER; note = (1,3-dimethylimidazolidin-2-ylidene) Phosphoramidate linkage
  modified_base order(2..17,18..31): mod_base = OTHER; note = Phosphorothioate linkage
  misc_feature 1..32: note = RM109788

SEQ ID NO: 1014 - DNA, 32 bp, synthetic construct; identical to SEQ ID NO: 190
  source 1..32: mol_type = other DNA
  misc_feature 12..14: note = DNA
  misc_feature order(1..11,15..32): note = RNA
  modified_base 13: mod_base = OTHER; note = DNA nucleotide carrying a 6-amino-5-nitro-3-yl-2(1H)-pyridone nucleobase
  modified_base 14: mod_base = OTHER; note = DNA nucleotide carrying a hypoxanthine nucleobase
  modified_base order(11,16,19): mod_base = OTHER; note = 2-Prime-Fluoro modified nucleoside
  modified_base order(1..10,15,17..18,20..32): mod_base = OTHER; note = 2-Prime-O-Methyl modified nucleoside
  modified_base order(1^2,14^15,31^32): mod_base = OTHER; note = (1,3-dimethylimidazolidin-2-ylidene) Phosphoramidate linkage
  modified_base order(2..14,15..31): mod_base = OTHER; note = Phosphorothioate linkage
  misc_feature 1..32: note = RM109789

SEQ ID NO: 1015 - DNA, 32 bp, synthetic construct; identical to SEQ ID NO: 191
  source 1..32: mol_type = other DNA
  misc_feature 9..11: note = DNA
  misc_feature order(1..8,12..32): note = RNA
  modified_base 10: mod_base = OTHER; note = DNA nucleotide carrying a 6-amino-5-nitro-3-yl-2(1H)-pyridone nucleobase
  modified_base 11: mod_base = OTHER; note = DNA nucleotide carrying a hypoxanthine nucleobase
  modified_base order(8,13,16): mod_base = OTHER; note = 2-Prime-Fluoro modified nucleoside
  modified_base order(1..7,12,14..15,17..32): mod_base = OTHER; note = 2-Prime-O-Methyl modified nucleoside
  modified_base order(1^2,11^12,31^32): mod_base = OTHER; note = (1,3-dimethylimidazolidin-2-ylidene) Phosphoramidate linkage
  modified_base order(2..11,12..31): mod_base = OTHER; note = Phosphorothioate linkage
  misc_feature 1..32: note = RM109790

SEQ ID NO: 1016 - DNA, 32 bp, synthetic construct; identical to SEQ ID NO: 192
  source 1..32: mol_type = other DNA
  misc_feature 6..8: note = DNA
  misc_feature order(1..5,9..32): note = RNA
  modified_base 7: mod_base = OTHER; note = DNA nucleotide carrying a 6-amino-5-nitro-3-yl-2(1H)-pyridone nucleobase
  modified_base 8: mod_base = OTHER; note = DNA nucleotide carrying a hypoxanthine nucleobase
  modified_base order(5,10,13): mod_base = OTHER; note = 2-Prime-Fluoro modified nucleoside
  modified_base order(1..4,9,11..12,14..32): mod_base = OTHER; note = 2-Prime-O-Methyl modified nucleoside
  modified_base order(1^2,8^9,31^32): mod_base = OTHER; note = (1,3-dimethylimidazolidin-2-ylidene) Phosphoramidate linkage
  modified_base order(2..8,9..31): mod_base = OTHER; note = Phosphorothioate linkage
  misc_feature 1..32: note = RM109791

SEQ ID NO: 1017 - DNA, 32 bp, synthetic construct; identical to SEQ ID NO: 185
  source 1..32: mol_type = other DNA
  misc_feature 27..29: note = DNA
  misc_feature order(1..26,30..32): note = RNA
  modified_base 28: mod_base = OTHER; note = DNA nucleotide carrying a 6-amino-5-nitro-3-yl-2(1H)-pyridone nucleobase
  modified_base 29: mod_base = OTHER; note = DNA nucleotide carrying a hypoxanthine nucleobase
  modified_base order(24,31..32): mod_base = OTHER; note = 2-Prime-Fluoro modified nucleoside
  modified_base order(1..23,25..26,30): mod_base = OTHER; note = 2-Prime-O-Methyl modified nucleoside
  modified_base order(1^2,29^30,31^32): mod_base = OTHER; note = (1,3-dimethylimidazolidin-2-ylidene) Phosphoramidate linkage
  modified_base order(2..29,30^31): mod_base = OTHER; note = Phosphorothioate linkage
  misc_feature 1..32: note = RM109792

SEQ ID NO: 1018 - DNA, 32 bp, synthetic construct; identical to SEQ ID NO: 186
  source 1..32: mol_type = other DNA
  misc_feature 24..26: note = DNA
  misc_feature order(1..23,27..32): note = RNA
  modified_base 25: mod_base = OTHER; note = DNA nucleotide carrying a 6-amino-5-nitro-3-yl-2(1H)-pyridone nucleobase
  modified_base 26: mod_base = OTHER; note = DNA nucleotide carrying a hypoxanthine nucleobase
  modified_base order(21,28..29): mod_base = OTHER; note = 2-Prime-Fluoro modified nucleoside
  modified_base order(1..20,22..23,27,30..32): mod_base = OTHER; note = 2-Prime-O-Methyl modified nucleoside
  modified_base order(1^2,26^27,31^32): mod_base = OTHER; note = (1,3-dimethylimidazolidin-2-ylidene) Phosphoramidate linkage
  modified_base order(2..26,27..31): mod_base = OTHER; note = Phosphorothioate linkage
  misc_feature 1..32: note = RM109793

SEQ ID NO: 1019 - DNA, 32 bp, synthetic construct; identical to SEQ ID NO: 187
  source 1..32: mol_type = other DNA
  misc_feature 21..23: note = DNA
  misc_feature order(1..20,24..32): note = RNA
  modified_base 22: mod_base = OTHER; note = DNA nucleotide carrying a 6-amino-5-nitro-3-yl-2(1H)-pyridone nucleobase
  modified_base 23: mod_base = OTHER; note = DNA nucleotide carrying a hypoxanthine nucleobase
  modified_base order(18,25..26): mod_base = OTHER; note = 2-Prime-Fluoro modified nucleoside
  modified_base order(1..17,19..20,24,27..32): mod_base = OTHER; note = 2-Prime-O-Methyl modified nucleoside
  modified_base order(1^2,23^24,31^32): mod_base = OTHER; note = (1,3-dimethylimidazolidin-2-ylidene) Phosphoramidate linkage
  modified_base order(2..23,24..31): mod_base = OTHER; note = Phosphorothioate linkage
  misc_feature 1..32: note = RM109794

SEQ ID NO: 1020 - DNA, 32 bp, synthetic construct; identical to SEQ ID NO: 5
  source 1..32: mol_type = other DNA
  misc_feature 18..20: note = DNA
  misc_feature order(1..17,21..32): note = RNA
  modified_base 19: mod_base = OTHER; note = DNA nucleotide carrying a 6-amino-5-nitro-3-yl-2(1H)-pyridone nucleobase
  modified_base 20: mod_base = OTHER; note = DNA nucleotide carrying a hypoxanthine nucleobase
  modified_base order(15,22..23): mod_base = OTHER; note = 2-Prime-Fluoro modified nucleoside
  modified_base order(1..14,16..17,21,24..32): mod_base = OTHER; note = 2-Prime-O-Methyl modified nucleoside
  modified_base order(1^2,20^21,31^32): mod_base = OTHER; note = (1,3-dimethylimidazolidin-2-ylidene) Phosphoramidate linkage
  modified_base order(2..20,21..31): mod_base = OTHER; note = Phosphorothioate linkage
  misc_feature 1..32: note = RM109795

SEQ ID NO: 1021 - DNA, 32 bp, synthetic construct; identical to SEQ ID NO: 189
  source 1..32: mol_type = other DNA
  misc_feature 15..17: note = DNA
  misc_feature order(1..14,18..32): note = RNA
  modified_base 16: mod_base = OTHER; note = DNA nucleotide carrying a 6-amino-5-nitro-3-yl-2(1H)-pyridone nucleobase
  modified_base 17: mod_base = OTHER; note = DNA nucleotide carrying a hypoxanthine nucleobase
  modified_base order(12,19..20): mod_base = OTHER; note = 2-Prime-Fluoro modified nucleoside
  modified_base order(1..11,13..14,18,21..32): mod_base = OTHER; note = 2-Prime-O-Methyl modified nucleoside
  modified_base order(1^2,17^18,31^32): mod_base = OTHER; note = (1,3-dimethylimidazolidin-2-ylidene) Phosphoramidate linkage
  modified_base order(2..17,18..31): mod_base = OTHER; note = Phosphorothioate linkage
  misc_feature 1..32: note = RM109796

SEQ ID NO: 1022 - DNA, 32 bp, synthetic construct; identical to SEQ ID NO: 190
  source 1..32: mol_type = other DNA
  misc_feature 12..14: note = DNA
  misc_feature order(1..11,15..32): note = RNA
  modified_base 13: mod_base = OTHER; note = DNA nucleotide carrying a 6-amino-5-nitro-3-yl-2(1H)-pyridone nucleobase
  modified_base 14: mod_base = OTHER; note = DNA nucleotide carrying a hypoxanthine nucleobase
  modified_base order(9,16..17): mod_base = OTHER; note = 2-Prime-Fluoro modified nucleoside
  modified_base order(1..8,10..11,15,18..32): mod_base = OTHER; note = 2-Prime-O-Methyl modified nucleoside
  modified_base order(1^2,14^15,31^32): mod_base = OTHER; note = (1,3-dimethylimidazolidin-2-ylidene) Phosphoramidate linkage
  modified_base order(2..14,15..31): mod_base = OTHER; note = Phosphorothioate linkage
  misc_feature 1..32: note = RM109797

SEQ ID NO: 1023 - DNA, 32 bp, synthetic construct; identical to SEQ ID NO: 191
  source 1..32: mol_type = other DNA
  misc_feature 9..11: note = DNA
  misc_feature order(1..8,12..32): note = RNA
  modified_base 10: mod_base = OTHER; note = DNA nucleotide carrying a 6-amino-5-nitro-3-yl-2(1H)-pyridone nucleobase
  modified_base 11: mod_base = OTHER; note = DNA nucleotide carrying a hypoxanthine nucleobase
  modified_base order(6,13..14): mod_base = OTHER; note = 2-Prime-Fluoro modified nucleoside
  modified_base order(1..5,7..8,12,15..32): mod_base = OTHER; note = 2-Prime-O-Methyl modified nucleoside
  modified_base order(1^2,11^12,31^32): mod_base = OTHER; note = (1,3-dimethylimidazolidin-2-ylidene) Phosphoramidate linkage
  modified_base order(2..11,12..31): mod_base = OTHER; note = Phosphorothioate linkage
  misc_feature 1..32: note = RM109798

SEQ ID NO: 1024 - DNA, 32 bp, synthetic construct; identical to SEQ ID NO: 192
  source 1..32: mol_type = other DNA
  misc_feature 6..8: note = DNA
  misc_feature order(1..5,9..32): note = RNA
  modified_base 7: mod_base = OTHER; note = DNA nucleotide carrying a 6-amino-5-nitro-3-yl-2(1H)-pyridone nucleobase
  modified_base 8: mod_base = OTHER; note = DNA nucleotide carrying a hypoxanthine nucleobase
  modified_base order(3,10..11): mod_base = OTHER; note = 2-Prime-Fluoro modified nucleoside
  modified_base order(1..2,4..5,9,12..32): mod_base = OTHER; note = 2-Prime-O-Methyl modified nucleoside
  modified_base order(1^2,8^9,31^32): mod_base = OTHER; note = (1,3-dimethylimidazolidin-2-ylidene) Phosphoramidate linkage
  modified_base order(2..8,9..31): mod_base = OTHER; note = Phosphorothioate linkage
  misc_feature 1..32: note = RM109799

SEQ ID NO: 1025 - DNA, 32 bp, synthetic construct; identical to SEQ ID NO: 191
  source 1..32: mol_type = other DNA
  misc_feature 9..11: note = DNA
  misc_feature order(1..8,12..32): note = RNA
  modified_base 10: mod_base = OTHER; note = DNA nucleotide carrying a 6-amino-5-nitro-3-yl-2(1H)-pyridone nucleobase
  modified_base 11: mod_base = OTHER; note = DNA nucleotide carrying a hypoxanthine nucleobase
  modified_base order(3,13..14,24,29..30): mod_base = OTHER; note = 2-Prime-Fluoro modified nucleoside
  modified_base order(1..2,4..8,12,15..23,25..28,31..32): mod_base = OTHER; note = 2-Prime-O-Methyl modified nucleoside
  modified_base order(1^2,11^12,31^32): mod_base = OTHER; note = (1,3-dimethylimidazolidin-2-ylidene) Phosphoramidate linkage
  modified_base order(2..11,12..31): mod_base = OTHER; note = Phosphorothioate linkage
  misc_feature 1..32: note = RM109800

SEQ ID NO: 1026 - DNA, 32 bp, synthetic construct; identical to SEQ ID NO: 187
  source 1..32: mol_type = other DNA
  misc_feature 21..23: note = DNA
  misc_feature order(1..20,24..32): note = RNA
  modified_base 22: mod_base = OTHER; note = DNA nucleotide carrying a 6-amino-5-nitro-3-yl-2(1H)-pyridone nucleobase
  modified_base 23: mod_base = OTHER; note = DNA nucleotide carrying a hypoxanthine nucleobase
  modified_base order(4..5,10,20,25,31): mod_base = OTHER; note = 2-Prime-Fluoro modified nucleoside
  modified_base order(1..3,6..9,11..19,24,26..30,32): mod_base = OTHER; note = 2-Prime-O-Methyl modified nucleoside
  modified_base order(1^2,23^24,31^32): mod_base = OTHER; note = (1,3-dimethylimidazolidin-2-ylidene) Phosphoramidate linkage
  modified_base order(2..23,24..31): mod_base = OTHER; note = Phosphorothioate linkage
  misc_feature 1..32: note = RM109801

SEQ ID NO: 1027 - DNA, 32 bp, synthetic construct; identical to SEQ ID NO: 5
  source 1..32: mol_type = other DNA
  misc_feature 18..20: note = DNA
  misc_feature order(1..17,21..32): note = RNA
  modified_base 19: mod_base = OTHER; note = DNA nucleotide carrying a 6-amino-5-nitro-3-yl-2(1H)-pyridone nucleobase
  modified_base 20: mod_base = OTHER; note = DNA nucleotide carrying a hypoxanthine nucleobase
  modified_base order(1..2,7,17,22,28): mod_base = OTHER; note = 2-Prime-Fluoro modified nucleoside
  modified_base order(3..6,8..16,21,23..27,29..32): mod_base = OTHER; note = 2-Prime-O-Methyl modified nucleoside
  modified_base order(1^2,20^21,31^32): mod_base = OTHER; note = (1,3-dimethylimidazolidin-2-ylidene) Phosphoramidate linkage
  modified_base order(2..20,21..31): mod_base = OTHER; note = Phosphorothioate linkage
  misc_feature 1..32: note = RM109802

SEQ ID NO: 1028 - DNA, 23 bp, synthetic construct
  source 1..23: mol_type = other DNA
  misc_feature 8..10: note = DNA
  misc_feature order(1..7,11..23): note = RNA
  modified_base 9: mod_base = OTHER; note = DNA nucleotide carrying a 6-amino-5-nitro-3-yl-2(1H)-pyridone nucleobase
  modified_base 10: mod_base = OTHER; note = DNA nucleotide carrying a hypoxanthine nucleobase
  modified_base order(2,12..13,23): mod_base = OTHER; note = 2-Prime-Fluoro modified nucleoside
  modified_base order(1,3..7,11,14..22): mod_base = OTHER; note = 2-Prime-O-Methyl modified nucleoside
  modified_base order(1^2,10^11,22^23): mod_base = OTHER; note = (1,3-dimethylimidazolidin-2-ylidene) Phosphoramidate linkage
  modified_base order(2..10,11..22): mod_base = OTHER; note = Phosphorothioate linkage
  misc_feature 1..23: note = RM109803
tgccatacnntgccaccagggcg

SEQ ID NO: 1029 - DNA, 23 bp, synthetic construct
  source 1..23: mol_type = other DNA
  misc_feature 17..19: note = DNA
  misc_feature order(1..16,20..23): note = RNA
  modified_base 18: mod_base = OTHER; note = DNA nucleotide carrying a 6-amino-5-nitro-3-yl-2(1H)-pyridone nucleobase
  modified_base 19: mod_base = OTHER; note = DNA nucleotide carrying a hypoxanthine nucleobase
  modified_base order(11,21): mod_base = OTHER; note = 2-Prime-Fluoro modified nucleoside
  modified_base order(1..10,12..16,20,22..23): mod_base = OTHER; note = 2-Prime-O-Methyl modified nucleoside
  modified_base order(1^2,19^20,22^23): mod_base = OTHER; note = (1,3-dimethylimidazolidin-2-ylidene) Phosphoramidate linkage
  modified_base order(2..19,20..22): mod_base = OTHER; note = Phosphorothioate linkage
  misc_feature 1..23: note = RM109804
ggggcatgatgccatacnntgcc

SEQ ID NO: 1030 - DNA, 23 bp, synthetic construct
  source 1..23: mol_type = other DNA
  misc_feature 14..16: note = DNA
  misc_feature order(1..13,17..23): note = RNA
  modified_base 15: mod_base = OTHER; note = DNA nucleotide carrying a 6-amino-5-nitro-3-yl-2(1H)-pyridone nucleobase
  modified_base 16: mod_base = OTHER; note = DNA nucleotide carrying a hypoxanthine nucleobase
  modified_base order(8,18): mod_base = OTHER; note = 2-Prime-Fluoro modified nucleoside
  modified_base order(1..7,9..13,17,19..23): mod_base = OTHER; note = 2-Prime-O-Methyl modified nucleoside
  modified_base order(1^2,16^17,22^23): mod_base = OTHER; note = (1,3-dimethylimidazolidin-2-ylidene) Phosphoramidate linkage
  modified_base order(2..16,17..22): mod_base = OTHER; note = Phosphorothioate linkage
  misc_feature 1..23: note = RM109805
gcatgatgccatacnntgccacc

SEQ ID NO: 1031 - DNA, 23 bp, synthetic construct
  source 1..23: mol_type = other DNA
  misc_feature 11..13: note = DNA
  misc_feature order(1..10,14..23): note = RNA
  modified_base 12: mod_base = OTHER; note = DNA nucleotide carrying a 6-amino-5-nitro-3-yl-2(1H)-pyridone nucleobase
  modified_base 13: mod_base = OTHER; note = DNA nucleotide carrying a hypoxanthine nucleobase
  modified_base order(5,15): mod_base = OTHER; note = 2-Prime-Fluoro modified nucleoside
  modified_base order(1..4,6..10,14,16..23): mod_base = OTHER; note = 2-Prime-O-Methyl modified nucleoside
  modified_base order(1^2,13^14,22^23): mod_base = OTHER; note = (1,3-dimethylimidazolidin-2-ylidene) Phosphoramidate linkage
  modified_base order(2..13,14..22): mod_base = OTHER; note = Phosphorothioate linkage
  misc_feature 1..23: note = RM109806
tgatgccatacnntgccaccagg

SEQ ID NO: 1032 - DNA, 23 bp, synthetic construct
  source 1..23: mol_type = other DNA
  misc_feature 8..10: note = DNA
  misc_feature order(1..7,11..23): note = RNA
  modified_base 9: mod_base = OTHER; note = DNA nucleotide carrying a 6-amino-5-nitro-3-yl-2(1H)-pyridone nucleobase
  modified_base 10: mod_base = OTHER; note = DNA nucleotide carrying a hypoxanthine nucleobase
  modified_base order(2,12): mod_base = OTHER; note = 2-Prime-Fluoro modified nucleoside
  modified_base order(1,3..7,11,13..23): mod_base = OTHER; note = 2-Prime-O-Methyl modified nucleoside
  modified_base order(1^2,10^11,22^23): mod_base = OTHER; note = (1,3-dimethylimidazolidin-2-ylidene) Phosphoramidate linkage
  modified_base order(2..10,11..22): mod_base = OTHER; note = Phosphorothioate linkage
  misc_feature 1..23: note = RM109807
tgccatacnntgccaccagggcg

SEQ ID NO: 1033 - DNA, 26 bp, synthetic construct
  source 1..26: mol_type = other DNA
  misc_feature 21..23: note = DNA
  misc_feature order(1..20,24..26): note = RNA
  modified_base 22: mod_base = OTHER; note = DNA nucleotide carrying a 6-amino-5-nitro-3-yl-2(1H)-pyridone nucleobase
  modified_base 23: mod_base = OTHER; note = DNA nucleotide carrying a hypoxanthine nucleobase
  modified_base order(15,25): mod_base = OTHER; note = 2-Prime-Fluoro modified nucleoside
  modified_base order(1..14,16..20,24,26): mod_base = OTHER; note = 2-Prime-O-Methyl modified nucleoside
  modified_base order(1^2,23^24,25^26): mod_base = OTHER; note = (1,3-dimethylimidazolidin-2-ylidene) Phosphoramidate linkage
  modified_base order(2..23,24^25): mod_base = OTHER; note = Phosphorothioate linkage
  misc_feature 1..26: note = RM109808
gtgaggggcatgatgccatacnntgc

SEQ ID NO: 1034 - DNA, 26 bp, synthetic construct
  source 1..26: mol_type = other DNA
  misc_feature 18..20: note = DNA
  misc_feature order(1..17,21..26): note = RNA
  modified_base 19: mod_base = OTHER; note = DNA nucleotide carrying a 6-amino-5-nitro-3-yl-2(1H)-pyridone nucleobase
  modified_base 20: mod_base = OTHER; note = DNA nucleotide carrying a hypoxanthine nucleobase
  modified_base order(12,22): mod_base = OTHER; note = 2-Prime-Fluoro modified nucleoside
  modified_base order(1..11,13..17,21,23..26): mod_base = OTHER; note = 2-Prime-O-Methyl modified nucleoside
  modified_base order(1^2,20^21,25^26): mod_base = OTHER; note = (1,3-dimethylimidazolidin-2-ylidene) Phosphoramidate linkage
  modified_base order(2..20,21..25): mod_base = OTHER; note = Phosphorothioate linkage
  misc_feature 1..26: note = RM109809
aggggcatgatgccatacnntgccac

SEQ ID NO: 1035 - DNA, 26 bp, synthetic construct
  source 1..26: mol_type = other DNA
  misc_feature 15..17: note = DNA
  misc_feature order(1..14,18..26): note = RNA
  modified_base 16: mod_base = OTHER; note = DNA nucleotide carrying a 6-amino-5-nitro-3-yl-2(1H)-pyridone nucleobase
  modified_base 17: mod_base = OTHER; note = DNA nucleotide carrying a hypoxanthine nucleobase
  modified_base order(9,19): mod_base = OTHER; note = 2-Prime-Fluoro modified nucleoside
  modified_base order(1..8,10..14,18,20..26): mod_base = OTHER; note = 2-Prime-O-Methyl modified nucleoside
  modified_base order(1^2,17^18,25^26): mod_base = OTHER; note = (1,3-dimethylimidazolidin-2-ylidene) Phosphoramidate linkage
  modified_base order(2..17,18..25): mod_base = OTHER; note = Phosphorothioate linkage
  misc_feature 1..26: note = RM109810
ggcatgatgccatacnntgccaccag

SEQ ID NO: 1036 - DNA, 26 bp, synthetic construct
  source 1..26: mol_type = other DNA
  misc_feature 12..14: note = DNA
  misc_feature order(1..11,15..26): note = RNA
  modified_base 13: mod_base = OTHER; note = DNA nucleotide carrying a 6-amino-5-nitro-3-yl-2(1H)-pyridone nucleobase
  modified_base 14: mod_base = OTHER; note = DNA nucleotide carrying a hypoxanthine nucleobase
  modified_base order(6,16): mod_base = OTHER; note = 2-Prime-Fluoro modified nucleoside
  modified_base order(1..5,7..11,15,17..26): mod_base = OTHER; note = 2-Prime-O-Methyl modified nucleoside
  modified_base order(1^2,14^15,25^26): mod_base = OTHER; note = (1,3-dimethylimidazolidin-2-ylidene) Phosphoramidate linkage
  modified_base order(2..14,15..25): mod_base = OTHER; note = Phosphorothioate linkage
  misc_feature 1..26: note = RM109811
atgatgccatacnntgccaccagggc

SEQ ID NO: 1037 - DNA, 26 bp, synthetic construct
  source 1..26: mol_type = other DNA
  misc_feature 9..11: note = DNA
  misc_feature order(1..8,12..26): note = RNA
  modified_base 10: mod_base = OTHER; note = DNA nucleotide carrying a 6-amino-5-nitro-3-yl-2(1H)-pyridone nucleobase
  modified_base 11: mod_base = OTHER; note = DNA nucleotide carrying a hypoxanthine nucleobase
  modified_base order(3,13): mod_base = OTHER; note = 2-Prime-Fluoro modified nucleoside
  modified_base order(1..2,4..8,12,14..26): mod_base = OTHER; note = 2-Prime-O-Methyl modified nucleoside
  modified_base order(1^2,11^12,25^26): mod_base = OTHER; note = (1,3-dimethylimidazolidin-2-ylidene) Phosphoramidate linkage
  modified_base order(2..11,12..25): mod_base = OTHER; note = Phosphorothioate linkage
  misc_feature 1..26: note = RM109812
atgccatacnntgccaccagggcgat

SEQ ID NO: 1038 - DNA, 29 bp, synthetic construct
  source 1..29: mol_type = other DNA
  misc_feature 23..25: note = DNA
  misc_feature order(1..22,26..29): note = RNA
  modified_base 24: mod_base = OTHER; note = DNA nucleotide carrying a 6-amino-5-nitro-3-yl-2(1H)-pyridone nucleobase
  modified_base 25: mod_base = OTHER; note = DNA nucleotide carrying a hypoxanthine nucleobase
  modified_base order(17,27): mod_base = OTHER; note = 2-Prime-Fluoro modified nucleoside
  modified_base order(1..16,18..22,26,28..29): mod_base = OTHER; note = 2-Prime-O-Methyl modified nucleoside
  modified_base order(1^2,25^26,28^29): mod_base = OTHER; note = (1,3-dimethylimidazolidin-2-ylidene) Phosphoramidate linkage
  modified_base order(2..25,26..28): mod_base = OTHER; note = Phosphorothioate linkage
  misc_feature 1..29: note = RM109813
ccgtgaggggcatgatgccatacnntgcc

SEQ ID NO: 1039 - DNA, 29 bp, synthetic construct
  source 1..29: mol_type = other DNA
  misc_feature 20..22: note = DNA
  misc_feature order(1..19,23..29): note = RNA
  modified_base 21: mod_base = OTHER; note = DNA nucleotide carrying a 6-amino-5-nitro-3-yl-2(1H)-pyridone nucleobase
  modified_base 22: mod_base = OTHER; note = DNA nucleotide carrying a hypoxanthine nucleobase
  modified_base order(14,24): mod_base = OTHER; note = 2-Prime-Fluoro modified nucleoside
  modified_base order(1..13,15..19,23,25..29): mod_base = OTHER; note = 2-Prime-O-Methyl modified nucleoside
  modified_base order(1^2,22^23,28^29): mod_base = OTHER; note = (1,3-dimethylimidazolidin-2-ylidene) Phosphoramidate linkage
  modified_base order(2..22,23..28): mod_base = OTHER; note = Phosphorothioate linkage
  misc_feature 1..29: note = RM109814
tgaggggcatgatgccatacnntgccacc

SEQ ID NO: 1040 - DNA, 29 bp, synthetic construct
  source 1..29: mol_type = other DNA
  misc_feature 17..19: note = DNA
  misc_feature order(1..16,20..29): note = RNA
  modified_base 18: mod_base = OTHER; note = DNA nucleotide carrying a 6-amino-5-nitro-3-yl-2(1H)-pyridone nucleobase
  modified_base 19: mod_base = OTHER; note = DNA nucleotide carrying a hypoxanthine nucleobase
  modified_base order(11,21): mod_base = OTHER; note = 2-Prime-Fluoro modified nucleoside
  modified_base order(1..10,12..16,20,22..29): mod_base = OTHER; note = 2-Prime-O-Methyl modified nucleoside
  modified_base order(1^2,19^20,28^29): mod_base = OTHER; note = (1,3-dimethylimidazolidin-2-ylidene) Phosphoramidate linkage
  modified_base order(2..19,20..28): mod_base = OTHER; note = Phosphorothioate linkage
  misc_feature 1..29: note = RM109815
ggggcatgatgccatacnntgccaccagg

SEQ ID NO: 1041 - DNA, 29 bp, synthetic construct
  source 1..29: mol_type = other DNA
  misc_feature 14..16: note = DNA
  misc_feature order(1..13,17..29): note = RNA
  modified_base 15: mod_base = OTHER; note = DNA nucleotide carrying a 6-amino-5-nitro-3-yl-2(1H)-pyridone nucleobase
  modified_base 16: mod_base = OTHER; note = DNA nucleotide carrying a hypoxanthine nucleobase
  modified_base order(8,18): mod_base = OTHER; note = 2-Prime-Fluoro modified nucleoside
  modified_base order(1..7,9..13,17,19..29): mod_base = OTHER; note = 2-Prime-O-Methyl modified nucleoside
  modified_base order(1^2,16^17,28^29): mod_base = OTHER; note = (1,3-dimethylimidazolidin-2-ylidene) Phosphoramidate linkage
  modified_base order(2..16,17..28): mod_base = OTHER; note = Phosphorothioate linkage
  misc_feature 1..29: note = RM109816
gcatgatgccatacnntgccaccagggcg

SEQ ID NO: 1042 - DNA, 29 bp, synthetic construct
  source 1..29: mol_type = other DNA
  misc_feature 11..13: note = DNA
  misc_feature order(1..10,14..29): note = RNA
  modified_base 12: mod_base = OTHER; note = DNA nucleotide carrying a 6-amino-5-nitro-3-yl-2(1H)-pyridone nucleobase
  modified_base 13: mod_base = OTHER; note = DNA nucleotide carrying a hypoxanthine nucleobase
  modified_base order(5,15): mod_base = OTHER; note = 2-Prime-Fluoro modified nucleoside
  modified_base order(1..4,6..10,14,16..29): mod_base = OTHER; note = 2-Prime-O-Methyl modified nucleoside
  modified_base order(1^2,13^14,28^29): mod_base = OTHER; note = (1,3-dimethylimidazolidin-2-ylidene) Phosphoramidate linkage
  modified_base order(2..13,14..28): mod_base = OTHER; note = Phosphorothioate linkage
  misc_feature 1..29: note = RM109817
tgatgccatacnntgccaccagggcgatg

SEQ ID NO: 1043 - DNA, 29 bp, synthetic construct
  source 1..29: mol_type = other DNA
  misc_feature 8..10: note = DNA
  misc_feature order(1..7,11..29): note = RNA
  modified_base 9: mod_base = OTHER; note = DNA nucleotide carrying a 6-amino-5-nitro-3-yl-2(1H)-pyridone nucleobase
  modified_base 10: mod_base = OTHER; note = DNA nucleotide carrying a hypoxanthine nucleobase
  modified_base order(2,12): mod_base = OTHER; note = 2-Prime-Fluoro modified nucleoside
  modified_base order(1,3..7,11,13..29): mod_base = OTHER; note = 2-Prime-O-Methyl modified nucleoside
  modified_base order(1^2,10^11,28^29): mod_base = OTHER; note = (1,3-dimethylimidazolidin-2-ylidene) Phosphoramidate linkage
  modified_base order(2..10,11..28): mod_base = OTHER; note = Phosphorothioate linkage
  misc_feature 1..29: note = RM109818
tgccatacnntgccaccagggcgatggcc

SEQ ID NO: 1044 - DNA, 29 bp, synthetic construct
  source 1..29: mol_type = other DNA
  misc_feature 17..19: note = DNA
  misc_feature order(1..16,20..29): note = RNA
  modified_base 18: mod_base = OTHER; note = DNA nucleotide carrying a 6-amino-5-nitro-3-yl-2(1H)-pyridone nucleobase
  modified_base 19: mod_base = OTHER; note = DNA nucleotide carrying a hypoxanthine nucleobase
  modified_base order(4,6,10,13,21..23,27): mod_base = OTHER; note = 2-Prime-Fluoro modified nucleoside
  modified_base order(1..3,5,7..9,11..12,14..16,20,24..26,28..29): mod_base = OTHER; note = 2-Prime-O-Methyl modified nucleoside
  modified_base order(1^2,19^20,28^29): mod_base = OTHER; note = (1,3-dimethylimidazolidin-2-ylidene) Phosphoramidate linkage
  modified_base order(2..19,20..28): mod_base = OTHER; note = Phosphorothioate linkage
  misc_feature 1..29: note = RM109819
ggggcatgatgccatacnntgccaccagg

SEQ ID NO: 1045 - DNA, 29 bp, synthetic construct
  source 1..29: mol_type = other DNA
  misc_feature 14..16: note = DNA
  misc_feature order(1..13,17..29): note = RNA
  modified_base 15: mod_base = OTHER; note = DNA nucleotide carrying a 6-amino-5-nitro-3-yl-2(1H)-pyridone nucleobase
  modified_base 16: mod_base = OTHER; note = DNA nucleotide carrying a hypoxanthine nucleobase
  modified_base order(1,3,7,10,18..20,24): mod_base = OTHER; note = 2-Prime-Fluoro modified nucleoside
  modified_base order(2,4..6,8..9,11..13,17,21..23,25..29): mod_base = OTHER; note = 2-Prime-O-Methyl modified nucleoside
  modified_base order(1^2,16^17,28^29): mod_base = OTHER; note = (1,3-dimethylimidazolidin-2-ylidene) Phosphoramidate linkage
  modified_base order(2..16,17..28): mod_base = OTHER; note = Phosphorothioate linkage
  misc_feature 1..29: note = RM109820
gcatgatgccatacnntgccaccagggcg

SEQ ID NO: 1046 - DNA, 29 bp, synthetic construct
  source 1..29: mol_type = other DNA
  misc_feature 11..13: note = DNA
  misc_feature order(1..10,14..29): note = RNA
  modified_base 12: mod_base = OTHER; note = DNA nucleotide carrying a 6-amino-5-nitro-3-yl-2(1H)-pyridone nucleobase
  modified_base 13: mod_base = OTHER; note = DNA nucleotide carrying a hypoxanthine nucleobase
  modified_base order(5,9..10,15,19,22,26,28): mod_base = OTHER; note = 2-Prime-Fluoro modified nucleoside
  modified_base order(1..4,6..8,14,16..18,20..21,23..25,27,29): mod_base = OTHER; note = 2-Prime-O-Methyl modified nucleoside
  modified_base order(1^2,13^14,28^29): mod_base = OTHER; note = (1,3-dimethylimidazolidin-2-ylidene) Phosphoramidate linkage
  modified_base order(2..13,14..28): mod_base = OTHER; note = Phosphorothioate linkage
  misc_feature 1..29: note = RM109821
tgatgccatacnntgccaccagggcgatg

SEQ ID NO: 1047 - DNA, 29 bp, synthetic construct
  source 1..29: mol_type = other DNA
  misc_feature 8..10: note = DNA
  misc_feature order(1..7,11..29): note = RNA
  modified_base 9: mod_base = OTHER; note = DNA nucleotide carrying a 6-amino-5-nitro-3-yl-2(1H)-pyridone nucleobase
  modified_base 10: mod_base = OTHER; note = DNA nucleotide carrying a hypoxanthine nucleobase
  modified_base order(2,6..7,12,16,19,23,25): mod_base = OTHER; note = 2-Prime-Fluoro modified nucleoside
  modified_base order(1,3..5,11,13..15,17..18,20..22,24,26..29): mod_base = OTHER; note = 2-Prime-O-Methyl modified nucleoside
  modified_base order(1^2,10^11,28^29): mod_base = OTHER; note = (1,3-dimethylimidazolidin-2-ylidene) Phosphoramidate linkage
  modified_base order(2..10,11..28): mod_base = OTHER; note = Phosphorothioate linkage
  misc_feature 1..29: note = RM109822
tgccatacnntgccaccagggcgatggcc

SEQ ID NO: 1048 - DNA, 26 bp, synthetic construct
  source 1..26: mol_type = other DNA
  misc_feature 18..20: note = DNA
  misc_feature order(1..17,21..26): note = RNA
  modified_base 19: mod_base = OTHER; note = DNA nucleotide carrying a 6-amino-5-nitro-3-yl-2(1H)-pyridone nucleobase
  modified_base 20: mod_base = OTHER; note = DNA nucleotide carrying a hypoxanthine nucleobase
  modified_base order(11,14,22..24): mod_base = OTHER; note = 2-Prime-Fluoro modified nucleoside
  modified_base order(1..10,12..13,15..17,21,25..26): mod_base = OTHER; note = 2-Prime-O-Methyl modified nucleoside
  modified_base order(1^2,20^21,25^26): mod_base = OTHER; note = (1,3-dimethylimidazolidin-2-ylidene) Phosphoramidate linkage
  modified_base order(2..20,21..25): mod_base = OTHER; note = Phosphorothioate linkage
  misc_feature 1..26: note = RM109823
aggggcatgatgccatacnntgccac

SEQ ID NO: 1049 - DNA, 26 bp, synthetic construct
  source 1..26: mol_type = other DNA
  misc_feature 15..17: note = DNA
  misc_feature order(1..14,18..26): note = RNA
  modified_base 16: mod_base = OTHER; note = DNA nucleotide carrying a 6-amino-5-nitro-3-yl-2(1H)-pyridone nucleobase
  modified_base 17: mod_base = OTHER; note = DNA nucleotide carrying a hypoxanthine nucleobase
  modified_base order(8,11,19..21): mod_base = OTHER; note = 2-Prime-Fluoro modified nucleoside
  modified_base order(1..7,9..10,12..14,18,22..26): mod_base = OTHER; note = 2-Prime-O-Methyl modified nucleoside
  modified_base order(1^2,17^18,25^26): mod_base = OTHER; note = (1,3-dimethylimidazolidin-2-ylidene) Phosphoramidate linkage
  modified_base order(2..17,18..25): mod_base = OTHER; note = Phosphorothioate linkage
  misc_feature 1..26: note = RM109824
ggcatgatgccatacnntgccaccag

SEQ ID NO: 1050 - DNA, 26 bp, synthetic construct
  source 1..26: mol_type = other DNA
  misc_feature 12..14: note = DNA
  misc_feature order(1..11,15..26): note = RNA
  modified_base 13: mod_base = OTHER; note = DNA nucleotide carrying a 6-amino-5-nitro-3-yl-2(1H)-pyridone nucleobase
  modified_base 14: mod_base = OTHER; note = DNA nucleotide carrying a hypoxanthine nucleobase
  modified_base order(5,8,16..18): mod_base = OTHER; note = 2-Prime-Fluoro modified nucleoside
  modified_base order(1..4,6..7,9..11,15,19..26): mod_base = OTHER; note = 2-Prime-O-Methyl modified nucleoside
  modified_base order(1^2,14^15,25^26): mod_base = OTHER; note = (1,3-dimethylimidazolidin-2-ylidene) Phosphoramidate linkage
  modified_base order(2..14,15..25): mod_base = OTHER; note = Phosphorothioate linkage
  misc_feature 1..26: note = RM109825
atgatgccatacnntgccaccagggc

SEQ ID NO: 1051 - DNA, 26 bp, synthetic construct
  source 1..26: mol_type = other DNA
  misc_feature 9..11: note = DNA
  misc_feature order(1..8,12..26): note = RNA
  modified_base 10: mod_base = OTHER; note = DNA nucleotide carrying a 6-amino-5-nitro-3-yl-2(1H)-pyridone nucleobase
  modified_base 11: mod_base = OTHER; note = DNA nucleotide carrying a hypoxanthine nucleobase
  modified_base order(2,5,13..15): mod_base = OTHER; note = 2-Prime-Fluoro modified nucleoside
  modified_base order(1,3..4,6..8,12,16..26): mod_base = OTHER; note = 2-Prime-O-Methyl modified nucleoside
  modified_base order(1^2,11^12,25^26): mod_base = OTHER; note = (1,3-dimethylimidazolidin-2-ylidene) Phosphoramidate linkage
  modified_base order(2..11,12..25): mod_base = OTHER; note = Phosphorothioate linkage
  misc_feature 1..26: note = RM109826
atgccatacnntgccaccagggcgat

SEQ ID NO: 1052 - DNA, 29 bp, synthetic construct
  source 1..29: mol_type = other DNA
  misc_feature 23..25: note = DNA
  misc_feature order(1..22,26..29): note = RNA
  modified_base 24: mod_base = OTHER; note = DNA nucleotide carrying a 6-amino-5-nitro-3-yl-2(1H)-pyridone nucleobase
  modified_base 25: mod_base = OTHER; note = DNA nucleotide carrying a hypoxanthine nucleobase
  modified_base order(16,19,27..29): mod_base = OTHER; note = 2-Prime-Fluoro modified nucleoside
  modified_base order(1..15,17..18,20..22,26): mod_base = OTHER; note = 2-Prime-O-Methyl modified nucleoside
  modified_base order(1^2,25^26,28^29): mod_base = OTHER; note = (1,3-dimethylimidazolidin-2-ylidene) Phosphoramidate linkage
  modified_base order(2..25,26..28): mod_base = OTHER; note = Phosphorothioate linkage
  misc_feature 1..29: note = RM109827
ccgtgaggggcatgatgccatacnntgcc

SEQ ID NO: 1053 - DNA, 29 bp, synthetic construct
  source 1..29: mol_type = other DNA
  misc_feature 20..22: note = DNA
  misc_feature order(1..19,23..29): note = RNA
  modified_base 21: mod_base = OTHER; note = DNA nucleotide carrying a 6-amino-5-nitro-3-yl-2(1H)-pyridone nucleobase
  modified_base 22: mod_base = OTHER; note = DNA nucleotide carrying a hypoxanthine nucleobase
  modified_base order(13,16,24..26): mod_base = OTHER; note = 2-Prime-Fluoro modified nucleoside
  modified_base order(1..12,14..15,17..19,23,27..29): mod_base = OTHER; note = 2-Prime-O-Methyl modified nucleoside
  modified_base order(1^2,22^23,28^29): mod_base = OTHER; note = (1,3-dimethylimidazolidin-2-ylidene) Phosphoramidate linkage
  modified_base order(2..22,23..28): mod_base = OTHER; note = Phosphorothioate linkage
  misc_feature 1..29: note = RM109828
tgaggggcatgatgccatacnntgccacc

SEQ ID NO: 1054 - DNA, 29 bp, synthetic construct
  source 1..29: mol_type = other DNA
  misc_feature 17..19: note = DNA
  misc_feature order(1..16,20..29): note = RNA
  modified_base 18: mod_base = OTHER; note = DNA nucleotide carrying a 6-amino-5-nitro-3-yl-2(1H)-pyridone nucleobase
  modified_base 19: mod_base = OTHER; note = DNA nucleotide carrying a hypoxanthine nucleobase
  modified_base order(10,13,21..23): mod_base = OTHER; note = 2-Prime-Fluoro modified nucleoside
  modified_base order(1..9,11..12,14..16,20,24..29): mod_base = OTHER; note = 2-Prime-O-Methyl modified nucleoside
  modified_base order(1^2,19^20,28^29): mod_base = OTHER; note = (1,3-dimethylimidazolidin-2-ylidene) Phosphoramidate linkage
  modified_base order(2..19,20..28): mod_base = OTHER; note = Phosphorothioate linkage
  misc_feature 1..29: note = RM109829
ggggcatgatgccatacnntgccaccagg

SEQ ID NO: 1055 - DNA, 29 bp, synthetic construct
  source 1..29: mol_type = other DNA
  misc_feature 14..16: note = DNA
  misc_feature order(1..13,17..29): note = RNA
  modified_base 15: mod_base = OTHER; note = DNA nucleotide carrying a 6-amino-5-nitro-3-yl-2(1H)-pyridone nucleobase
  modified_base 16: mod_base = OTHER; note = DNA nucleotide carrying a hypoxanthine nucleobase
  modified_base order(7,10,18..20): mod_base = OTHER; note = 2-Prime-Fluoro modified nucleoside
  modified_base order(1..6,8..9,11..13,17,21..29): mod_base = OTHER; note = 2-Prime-O-Methyl modified nucleoside
  modified_base order(1^2,16^17,28^29): mod_base = OTHER; note = (1,3-dimethylimidazolidin-2-ylidene) Phosphoramidate linkage
  modified_base order(2..16,17..28): mod_base = OTHER; note = Phosphorothioate linkage
  misc_feature 1..29: note = RM109830
gcatgatgccatacnntgccaccagggcg

SEQ ID NO: 1056 - DNA, 29 bp, synthetic construct
  source 1..29: mol_type = other DNA
  misc_feature 11..13: note = DNA
  misc_feature order(1..10,14..29): note = RNA
  modified_base 12: mod_base = OTHER; note = DNA nucleotide carrying a 6-amino-5-nitro-3-yl-2(1H)-pyridone nucleobase
  modified_base 13: mod_base = OTHER; note = DNA nucleotide carrying a hypoxanthine nucleobase
  modified_base order(4,7,15..17): mod_base = OTHER; note = 2-Prime-Fluoro modified nucleoside
  modified_base order(1..3,5..6,8..10,14,18..29): mod_base = OTHER; note = 2-Prime-O-Methyl modified nucleoside
  modified_base order(1^2,13^14,28^29): mod_base = OTHER; note = (1,3-dimethylimidazolidin-2-ylidene) Phosphoramidate linkage
  modified_base order(2..13,14..28): mod_base = OTHER; note = Phosphorothioate linkage
  misc_feature 1..29: note = RM109831
tgatgccatacnntgccaccagggcgatg

SEQ ID NO: 1057 - DNA, 29 bp, synthetic construct
  source 1..29: mol_type = other DNA
  misc_feature 8..10: note = DNA
  misc_feature order(1..7,11..29): note = RNA
  modified_base 9: mod_base = OTHER; note = DNA nucleotide carrying a 6-amino-5-nitro-3-yl-2(1H)-pyridone nucleobase
  modified_base 10: mod_base = OTHER; note = DNA nucleotide carrying a hypoxanthine nucleobase
  modified_base order(1,4,12..14): mod_base = OTHER; note = 2-Prime-Fluoro modified nucleoside
  modified_base order(2..3,5..7,11,15..29): mod_base = OTHER; note = 2-Prime-O-Methyl modified nucleoside
  modified_base order(1^2,10^11,28^29): mod_base = OTHER; note = (1,3-dimethylimidazolidin-2-ylidene) Phosphoramidate linkage
  modified_base order(2..10,11..28): mod_base = OTHER; note = Phosphorothioate linkage
  misc_feature 1..29: note = RM109832
tgccatacnntgccaccagggcgatggcc

SEQ ID NO: 1058 - DNA, 26 bp, synthetic construct
  source 1..26: mol_type = other DNA
  misc_feature 15..17: note = DNA
  misc_feature order(1..14,18..26): note = RNA
  modified_base 16: mod_base = OTHER; note = DNA nucleotide carrying a 6-amino-5-nitro-3-yl-2(1H)-pyridone nucleobase
  modified_base 17: mod_base = OTHER; note = DNA nucleotide carrying a hypoxanthine nucleobase
  modified_base order(13..14,19,23,26): mod_base = OTHER; note = 2-Prime-Fluoro modified nucleoside
  modified_base order(1..12,18,20..22,24..25): mod_base = OTHER; note = 2-Prime-O-Methyl modified nucleoside
  modified_base order(1^2,17^18,25^26): mod_base = OTHER; note = (1,3-dimethylimidazolidin-2-ylidene) Phosphoramidate linkage
  modified_base order(2..17,18..25): mod_base = OTHER; note = Phosphorothioate linkage
  misc_feature 1..26: note = RM109833
ggcatgatgccatacnntgccaccag

SEQ ID NO: 1059 - DNA, 26 bp, synthetic construct
  source 1..26: mol_type = other DNA
  misc_feature 12..14: note = DNA
  misc_feature order(1..11,15..26): note = RNA
  modified_base 13: mod_base = OTHER; note = DNA nucleotide carrying a 6-amino-5-nitro-3-yl-2(1H)-pyridone nucleobase
  modified_base 14: mod_base = OTHER; note = DNA nucleotide carrying a hypoxanthine nucleobase
  modified_base order(10..11,16,20,23): mod_base = OTHER; note = 2-Prime-Fluoro modified nucleoside
  modified_base order(1..9,15,17..19,21..22,24..26): mod_base = OTHER; note = 2-Prime-O-Methyl modified nucleoside
  modified_base order(1^2,14^15,25^26): mod_base = OTHER; note = (1,3-dimethylimidazolidin-2-ylidene) Phosphoramidate linkage
  modified_base order(2..14,15..25): mod_base = OTHER; note = Phosphorothioate linkage
  misc_feature 1..26: note = RM109834
atgatgccatacnntgccaccagggc

SEQ ID NO: 1060 - DNA, 26 bp, synthetic construct
  source 1..26: mol_type = other DNA
  misc_feature 9..11: note = DNA
  misc_feature order(1..8,12..26): note = RNA
  modified_base 10: mod_base = OTHER; note = DNA nucleotide carrying a 6-amino-5-nitro-3-yl-2(1H)-pyridone nucleobase
  modified_base 11: mod_base = OTHER; note = DNA nucleotide carrying a hypoxanthine nucleobase
  modified_base order(7..8,13,17,20): mod_base = OTHER; note = 2-Prime-Fluoro modified nucleoside
  modified_base order(1..6,12,14..16,18..19,21..26): mod_base = OTHER; note = 2-Prime-O-Methyl modified nucleoside
  modified_base order(1^2,11^12,25^26): mod_base = OTHER; note = (1,3-dimethylimidazolidin-2-ylidene) Phosphoramidate linkage
  modified_base order(2..11,12..25): mod_base = OTHER; note = Phosphorothioate linkage
  misc_feature 1..26: note = RM109835
atgccatacnntgccaccagggcgat

SEQ ID NO: 1061 - DNA, 26 bp, synthetic construct
  source 1..26: mol_type = other DNA
  misc_feature 6..8: note = DNA
  misc_feature order(1..5,9..26): note = RNA
  modified_base 7: mod_base = OTHER; note = DNA nucleotide carrying a 6-amino-5-nitro-3-yl-2(1H)-pyridone nucleobase
  modified_base 8: mod_base = OTHER; note = DNA nucleotide carrying a hypoxanthine nucleobase
  modified_base order(4..5,10,14,17): mod_base = OTHER; note = 2-Prime-Fluoro modified nucleoside
  modified_base order(1..3,9,11..13,15..16,18..26): mod_base = OTHER; note = 2-Prime-O-Methyl modified nucleoside
  modified_base order(1^2,8^9,25^26): mod_base = OTHER; note = (1,3-dimethylimidazolidin-2-ylidene) Phosphoramidate linkage
  modified_base order(2..8,9..25): mod_base = OTHER; note = Phosphorothioate linkage
  misc_feature 1..26: note = RM109836
ccatacnntgccaccagggcgatggc

SEQ ID NO: 1062 - DNA, 29 bp, synthetic construct
  source 1..29: mol_type = other DNA
  misc_feature 17..19: note = DNA
  misc_feature order(1..16,20..29): note = RNA
  modified_base 18: mod_base = OTHER; note = DNA nucleotide carrying a 6-amino-5-nitro-3-yl-2(1H)-pyridone nucleobase
  modified_base 19: mod_base = OTHER; note = DNA nucleotide carrying a hypoxanthine nucleobase
  modified_base order(15..16,21,25,28): mod_base = OTHER; note = 2-Prime-Fluoro modified nucleoside
  modified_base order(1..14,20,22..24,26..27,29): mod_base = OTHER; note = 2-Prime-O-Methyl modified nucleoside
  modified_base order(1^2,19^20,28^29): mod_base = OTHER; note = (1,3-dimethylimidazolidin-2-ylidene) Phosphoramidate linkage
  modified_base order(2..19,20..28): mod_base = OTHER; note = Phosphorothioate linkage
  misc_feature 1..29: note = RM109837
ggggcatgatgccatacnntgccaccagg

SEQ ID NO: 1063 - DNA, 29 bp, synthetic construct
  source 1..29: mol_type = other DNA
  misc_feature 14..16: note = DNA
  misc_feature order(1..13,17..29): note = RNA
  modified_base 15: mod_base = OTHER; note = DNA nucleotide carrying a 6-amino-5-nitro-3-yl-2(1H)-pyridone nucleobase
  modified_base 16: mod_base = OTHER; note = DNA nucleotide carrying a hypoxanthine nucleobase
  modified_base order(12..13,18,22,25): mod_base = OTHER; note = 2-Prime-Fluoro modified nucleoside
  modified_base order(1..11,17,19..21,23..24,26..29): mod_base = OTHER; note = 2-Prime-O-Methyl modified nucleoside
  modified_base order(1^2,16^17,28^29): mod_base = OTHER; note = (1,3-dimethylimidazolidin-2-ylidene) Phosphoramidate linkage
  modified_base order(2..16,17..28): mod_base = OTHER; note = Phosphorothioate linkage
  misc_feature 1..29: note = RM109838
gcatgatgccatacnntgccaccagggcg

SEQ ID NO: 1064 - DNA, 29 bp, synthetic construct
  source 1..29: mol_type = other DNA
  misc_feature 11..13: note = DNA
  misc_feature order(1..10,14..29): note = RNA
  modified_base 12: mod_base = OTHER; note = DNA nucleotide carrying a 6-amino-5-nitro-3-yl-2(1H)-pyridone nucleobase
  modified_base 13: mod_base = OTHER; note = DNA nucleotide carrying a hypoxanthine nucleobase
  modified_base order(9..10,15,19,22): mod_base = OTHER; note = 2-Prime-Fluoro modified nucleoside
  modified_base order(1..8,14,16..18,20..21,23..29): mod_base = OTHER; note = 2-Prime-O-Methyl modified nucleoside
  modified_base order(1^2,13^14,28^29): mod_base = OTHER; note = (1,3-dimethylimidazolidin-2-ylidene) Phosphoramidate linkage
  modified_base order(2..13,14..28): mod_base = OTHER; note = Phosphorothioate linkage
  misc_feature 1..29: note = RM109839
tgatgccatacnntgccaccagggcgatg

SEQ ID NO: 1065 - DNA, 29 bp, synthetic construct
  source 1..29: mol_type = other DNA
  misc_feature 8..10: note = DNA
  misc_feature order(1..7,11..29): note = RNA
  modified_base 9: mod_base = OTHER; note = DNA nucleotide carrying a 6-amino-5-nitro-3-yl-2(1H)-pyridone nucleobase
  modified_base 10: mod_base = OTHER; note = DNA nucleotide carrying a hypoxanthine nucleobase
  modified_base order(6..7,12,16,19): mod_base = OTHER; note = 2-Prime-Fluoro modified nucleoside
  modified_base order(1..5,11,13..15,17..18,20..29): mod_base = OTHER; note = 2-Prime-O-Methyl modified nucleoside
  modified_base order(1^2,10^11,28^29): mod_base = OTHER; note = (1,3-dimethylimidazolidin-2-ylidene) Phosphoramidate linkage
  modified_base order(2..10,11..28): mod_base = OTHER; note = Phosphorothioate linkage
  misc_feature 1..29: note = RM109840
tgccatacnntgccaccagggcgatggcc

SEQ ID NO: 1066 - DNA, 29 bp, synthetic construct
  source 1..29: mol_type = other DNA
  misc_feature 5..7: note = DNA
  misc_feature order(1..4,8..29): note = RNA
  modified_base 6: mod_base = OTHER; note = DNA nucleotide carrying a 6-amino-5-nitro-3-yl-2(1H)-pyridone nucleobase
  modified_base 7: mod_base = OTHER; note = DNA nucleotide carrying a hypoxanthine nucleobase
  modified_base order(3..4,9,13,16): mod_base = OTHER; note = 2-Prime-Fluoro modified nucleoside
  modified_base order(1..2,8,10..12,14..15,17..29): mod_base = OTHER; note = 2-Prime-O-Methyl modified nucleoside
  modified_base order(1^2,7^8,28^29): mod_base = OTHER; note = (1,3-dimethylimidazolidin-2-ylidene) Phosphoramidate linkage
  modified_base order(2..7,8..28): mod_base = OTHER; note = Phosphorothioate linkage
  misc_feature 1..29: note = RM109841
catacnntgccaccagggcgatggccagc

SEQ ID NO: 1067 - DNA, 38 bp, synthetic construct
  source 1..38: mol_type = other DNA
  misc_feature 19..20: note = DNA
  misc_feature order(1..18,21..38): note = RNA
  modified_base 18: mod_base = OTHER; note = 2-Prime-O-Methoxyethyl modified 5-methyl Cytidine
  modified_base 19: mod_base = OTHER; note = DNA nucleotide carrying a 6-amino-5-nitro-3-yl-2(1H)-pyridone nucleobase
  modified_base 20: mod_base = OTHER; note = DNA nucleotide carrying a hypoxanthine nucleobase
  modified_base order(13,15,22,24,29..30): mod_base = OTHER; note = 2-Prime-Fluoro modified nucleoside
  modified_base order(1..12,14,16..17,21,23,25..28,31..38): mod_base = OTHER; note = 2-Prime-O-Methyl modified nucleoside
  modified_base order(1^2,37^38): mod_base = OTHER; note = (1,3-dimethylimidazolidin-2-ylidene) Phosphoramidate linkage
  modified_base order(2..20,21..37): mod_base = OTHER; note = Phosphorothioate linkage
  modified_base 20^21: mod_base = OTHER; note = Methylphosphonate linkage
  misc_feature 1..38: note = RM109842
aggggcatgatgccatacnntgccaccagggcgatggc

SEQ ID NO: 1068 - DNA, 38 bp, synthetic construct; identical to SEQ ID NO: 150
  source 1..38: mol_type = other DNA
  misc_feature 25..26: note = DNA
  misc_feature order(1..24,27..38): note = RNA
  modified_base 24: mod_base = OTHER; note = 2-Prime-O-Methoxyethyl modified 5-methyl Cytidine
  modified_base 25: mod_base = OTHER; note = DNA nucleotide carrying a 6-amino-5-nitro-3-yl-2(1H)-pyridone nucleobase
  modified_base 26: mod_base = OTHER; note = DNA nucleotide carrying a hypoxanthine nucleobase
  modified_base order(16,28,31): mod_base = OTHER; note = 2-Prime-Fluoro modified nucleoside
  modified_base order(1..15,17..23,27,29..30,32..38): mod_base = OTHER; note = 2-Prime-O-Methyl modified nucleoside
  modified_base order(1^2,37^38): mod_base = OTHER; note = (1,3-dimethylimidazolidin-2-ylidene) Phosphoramidate linkage
  modified_base order(2..26,27..37): mod_base = OTHER; note = Phosphorothioate linkage
  modified_base 26^27: mod_base = OTHER; note = Methylphosphonate linkage
  misc_feature 1..38: note = RM109843

SEQ ID NO: 1069 - DNA, 38 bp, synthetic construct
  source 1..38: mol_type = other DNA
  misc_feature 28..29: note = DNA
  misc_feature order(1..27,30..38): note = RNA
  modified_base 27: mod_base = OTHER; note = 2-Prime-O-Methoxyethyl modified 5-methyl Cytidine
  modified_base 28: mod_base = OTHER; note = DNA nucleotide carrying a 6-amino-5-nitro-3-yl-2(1H)-pyridone nucleobase
  modified_base 29: mod_base = OTHER; note = DNA nucleotide carrying a hypoxanthine nucleobase
  modified_base order(22..23,31): mod_base = OTHER; note = 2-Prime-Fluoro modified nucleoside
  modified_base order(1..21,24..26,30,32..38): mod_base = OTHER; note = 2-Prime-O-Methyl modified nucleoside
  modified_base order(1^2,37^38): mod_base = OTHER; note = (1,3-dimethylimidazolidin-2-ylidene) Phosphoramidate linkage
  modified_base order(2..29,30..37): mod_base = OTHER; note = Phosphorothioate linkage
  modified_base 29^30: mod_base = OTHER; note = Methylphosphonate linkage
  misc_feature 1..38: note = RM109844
aaggccgtgaggggcatgatgccatacnntgccaccag

SEQ ID NO: 1070 - DNA, 38 bp, synthetic construct
  source 1..38: mol_type = other DNA
  misc_feature 16..17: note = DNA
  misc_feature order(1..15,18..38): note = RNA
  modified_base 15: mod_base = OTHER; note = 2-Prime-O-Methoxyethyl modified 5-methyl Cytidine
  modified_base 16: mod_base = OTHER; note = DNA nucleotide carrying a 6-amino-5-nitro-3-yl-2(1H)-pyridone nucleobase
  modified_base 17: mod_base = OTHER; note = DNA nucleotide carrying a hypoxanthine nucleobase
  modified_base order(8..10,13,19..20): mod_base = OTHER; note = 2-Prime-Fluoro modified nucleoside
  modified_base order(1..7,11..12,14,18,21..38): mod_base = OTHER; note = 2-Prime-O-Methyl modified nucleoside
  modified_base order(1^2,37^38): mod_base = OTHER; note = (1,3-dimethylimidazolidin-2-ylidene) Phosphoramidate linkage
  modified_base order(2..17,18..37): mod_base = OTHER; note = Phosphorothioate linkage
  modified_base 17^18: mod_base = OTHER; note = Methylphosphonate linkage
  misc_feature 1..38: note = RM109845
ggcatgatgccatacnntgccaccagggcgatggccag

SEQ ID NO: 1071 - DNA, 38 bp, synthetic construct
  source 1..38: mol_type = other DNA
  misc_feature 13..14: note = DNA
  misc_feature order(1..12,15..38): note = RNA
  modified_base 12: mod_base = OTHER; note = 2-Prime-O-Methoxyethyl modified 5-methyl Cytidine
  modified_base 13: mod_base = OTHER; note = DNA nucleotide carrying a 6-amino-5-nitro-3-yl-2(1H)-pyridone nucleobase
  modified_base 14: mod_base = OTHER; note = DNA nucleotide carrying a hypoxanthine nucleobase
  modified_base order(11,16..17,19,23..24): mod_base = OTHER; note = 2-Prime-Fluoro modified nucleoside
  modified_base order(1..10,15,18,20..22,25..38): mod_base = OTHER; note = 2-Prime-O-Methyl modified nucleoside
  modified_base order(1^2,37^38): mod_base = OTHER; note = (1,3-dimethylimidazolidin-2-ylidene) Phosphoramidate linkage
  modified_base order(2..14,15..37): mod_base = OTHER; note = Phosphorothioate linkage
  modified_base 14^15: mod_base = OTHER; note = Methylphosphonate linkage
  misc_feature 1..38: note = RM109846
atgatgccatacnntgccaccagggcgatggccagccc

SEQ ID NO: 1072 - DNA, 38 bp, synthetic construct; identical to SEQ ID NO: 150
  source 1..38: mol_type = other DNA
  misc_feature 25..26: note = DNA
  misc_feature order(1..24,27..38): note = RNA
  modified_base 24: mod_base = OTHER; note = 2-Prime-O-Methoxyethyl modified 5-methyl Cytidine
  modified_base 25: mod_base = OTHER; note = DNA nucleotide carrying a 6-amino-5-nitro-3-yl-2(1H)-pyridone nucleobase
  modified_base 26: mod_base = OTHER; note = DNA nucleotide carrying a hypoxanthine nucleobase
  modified_base order(7,9,13,15..16,28,35..37): mod_base = OTHER; note = 2-Prime-Fluoro modified nucleoside
  modified_base order(1..6,8,10..12,14,17..23,27,29..34,38): mod_base = OTHER; note = 2-Prime-O-Methyl modified nucleoside
  modified_base order(1^2,37^38): mod_base = OTHER; note = (1,3-dimethylimidazolidin-2-ylidene) Phosphoramidate linkage
  modified_base order(2..26,27..37): mod_base = OTHER; note = Phosphorothioate linkage
  modified_base 26^27: mod_base = OTHER; note = Methylphosphonate linkage
  misc_feature 1..38: note = RM109847

SEQ ID NO: 1073 - DNA, 38 bp, synthetic construct; identical to SEQ ID NO: 1069
  source 1..38: mol_type = other DNA
  misc_feature 28..29: note = DNA
  misc_feature order(1..27,30..38): note = RNA
  modified_base 27: mod_base = OTHER; note = 2-Prime-O-Methoxyethyl modified 5-methyl Cytidine
  modified_base 28: mod_base = OTHER; note = DNA nucleotide carrying a 6-amino-5-nitro-3-yl-2(1H)-pyridone nucleobase
  modified_base 29: mod_base = OTHER; note = DNA nucleotide carrying a hypoxanthine nucleobase
  modified_base order(24,31..32): mod_base = OTHER; note = 2-Prime-Fluoro modified nucleoside
  modified_base order(1..23,25..26,30,33..38): mod_base = OTHER; note = 2-Prime-O-Methyl modified nucleoside
  modified_base order(1^2,37^38): mod_base = OTHER; note = (1,3-dimethylimidazolidin-2-ylidene) Phosphoramidate linkage
  modified_base order(2..29,30..37): mod_base = OTHER; note = Phosphorothioate linkage
  modified_base 29^30: mod_base = OTHER; note = Methylphosphonate linkage
  misc_feature 1..38: note = RM109848

SEQ ID NO: 1074 - DNA, 38 bp, synthetic construct; identical to SEQ ID NO: 150
  source 1..38: mol_type = other DNA
  misc_feature 25..26: note = DNA
  misc_feature order(1..24,27..38): note = RNA
  modified_base 24: mod_base = OTHER; note = 2-Prime-O-Methoxyethyl modified 5-methyl Cytidine
  modified_base 25: mod_base = OTHER; note = DNA nucleotide carrying a 6-amino-5-nitro-3-yl-2(1H)-pyridone nucleobase
  modified_base 26: mod_base = OTHER; note = DNA nucleotide carrying a hypoxanthine nucleobase
  modified_base order(13,15..16,28,31,33): mod_base = OTHER; note = 2-Prime-Fluoro modified nucleoside
  modified_base order(1..12,14,17..23,27,29..30,32,34..38): mod_base = OTHER; note = 2-Prime-O-Methyl modified nucleoside
  modified_base order(1^2,37^38): mod_base = OTHER; note = (1,3-dimethylimidazolidin-2-ylidene) Phosphoramidate linkage
  modified_base order(2..26,27..37): mod_base = OTHER; note = Phosphorothioate linkage
  modified_base 26^27: mod_base = OTHER; note = Methylphosphonate linkage
  misc_feature 1..38: note = RM109849

SEQ ID NO: 1075 - DNA, 38 bp, synthetic construct
  source 1..38: mol_type = other DNA
  misc_feature 22..23: note = DNA
  misc_feature order(1..21,24..38): note = RNA
  modified_base 21: mod_base = OTHER; note = 2-Prime-O-Methoxyethyl modified 5-methyl Cytidine
  modified_base 22: mod_base = OTHER; note = DNA nucleotide carrying a 6-amino-5-nitro-3-yl-2(1H)-pyridone nucleobase
  modified_base 23: mod_base = OTHER; note = DNA nucleotide carrying a hypoxanthine nucleobase
  modified_base order(14..16,19,25..26): mod_base = OTHER; note = 2-Prime-Fluoro modified nucleoside
  modified_base order(1..13,17..18,20,24,27..38): mod_base = OTHER; note = 2-Prime-O-Methyl modified nucleoside
  modified_base order(1^2,37^38): mod_base = OTHER; note = (1,3-dimethylimidazolidin-2-ylidene) Phosphoramidate linkage
  modified_base order(2..23,24..37): mod_base = OTHER; note = Phosphorothioate linkage
  modified_base 23^24: mod_base = OTHER; note = Methylphosphonate linkage
  misc_feature 1..38: note = RM109850
gtgaggggcatgatgccatacnntgccaccagggcgat

SEQ ID NO: 1076 - DNA, 38 bp, synthetic construct; identical to SEQ ID NO: 1067
  source 1..38: mol_type = other DNA
  misc_feature 19..20: note = DNA
  misc_feature order(1..18,21..38): note = RNA
  modified_base 18: mod_base = OTHER; note = 2-Prime-O-Methoxyethyl modified 5-methyl Cytidine
  modified_base 19: mod_base = OTHER; note = DNA nucleotide carrying a 6-amino-5-nitro-3-yl-2(1H)-pyridone nucleobase
  modified_base 20: mod_base = OTHER; note = DNA nucleotide carrying a hypoxanthine nucleobase
  modified_base order(14,16,22..23,25,28): mod_base = OTHER; note = 2-Prime-Fluoro modified nucleoside
  modified_base order(1..13,15,17,21,24,26..27,29..38): mod_base = OTHER; note = 2-Prime-O-Methyl modified nucleoside
  modified_base order(1^2,37^38): mod_base = OTHER; note = (1,3-dimethylimidazolidin-2-ylidene) Phosphoramidate linkage
  modified_base order(2..20,21..37): mod_base = OTHER; note = Phosphorothioate linkage
  modified_base 20^21: mod_base = OTHER; note = Methylphosphonate linkage
  misc_feature 1..38: note = RM109851

SEQ ID NO: 1077 - DNA, 38 bp, synthetic construct; identical to SEQ ID NO: 150
  source 1..38: mol_type = other DNA
  misc_feature 25..26: note = DNA
  misc_feature order(1..24,27..38): note = RNA
  modified_base 24: mod_base = OTHER; note = 2-Prime-O-Methoxyethyl modified 5-methyl Cytidine
  modified_base 25: mod_base = OTHER; note = DNA nucleotide carrying a 6-amino-5-nitro-3-yl-2(1H)-pyridone nucleobase
  modified_base 26: mod_base = OTHER; note = DNA nucleotide carrying a hypoxanthine nucleobase
  modified_base order(20,22..23,28..30): mod_base = OTHER; note = 2-Prime-Fluoro modified nucleoside
  modified_base order(1..19,21,27,31..38): mod_base = OTHER; note = 2-Prime-O-Methyl modified nucleoside
  modified_base order(1^2,37^38): mod_base = OTHER; note = (1,3-dimethylimidazolidin-2-ylidene) Phosphoramidate linkage
  modified_base order(2..26,27..37): mod_base = OTHER; note = Phosphorothioate linkage
  modified_base 26^27: mod_base = OTHER; note = Methylphosphonate linkage
  misc_feature 1..38: note = RM109852

SEQ ID NO: 1078 - DNA, 38 bp, synthetic construct; identical to SEQ ID NO: 150
  source 1..38: mol_type = other DNA
  misc_feature 25..26: note = DNA
  misc_feature order(1..24,27..38): note = RNA
  modified_base 24: mod_base = OTHER; note = 2-Prime-O-Methoxyethyl modified 5-methyl Cytidine
  modified_base 25: mod_base = OTHER; note = DNA nucleotide carrying a 6-amino-5-nitro-3-yl-2(1H)-pyridone nucleobase
  modified_base 26: mod_base = OTHER; note = DNA nucleotide carrying a hypoxanthine nucleobase
  modified_base order(21,23,28): mod_base = OTHER; note = 2-Prime-Fluoro modified nucleoside
  modified_base order(1..20,22,27,29..38): mod_base = OTHER; note = 2-Prime-O-Methyl modified nucleoside
  modified_base order(1^2,37^38): mod_base = OTHER; note = (1,3-dimethylimidazolidin-2-ylidene) Phosphoramidate linkage
  modified_base order(2..26,27..37): mod_base = OTHER; note = Phosphorothioate linkage
  modified_base 26^27: mod_base = OTHER; note = Methylphosphonate linkage
  misc_feature 1..38: note = RM109853

SEQ ID NO: 1079 - DNA, 38 bp, synthetic construct; identical to SEQ ID NO: 1071
  source 1..38: mol_type = other DNA
  misc_feature 13..14: note = DNA
  misc_feature order(1..12,15..38): note = RNA
  modified_base 12: mod_base = OTHER; note = 2-Prime-O-Methoxyethyl modified 5-methyl Cytidine
  modified_base 13: mod_base = OTHER; note = DNA nucleotide carrying a 6-amino-5-nitro-3-yl-2(1H)-pyridone nucleobase
  modified_base 14: mod_base = OTHER; note = DNA nucleotide carrying a hypoxanthine nucleobase
  modified_base order(5..6,11,16,18..19,21,24,29): mod_base = OTHER; note = 2-Prime-Fluoro modified nucleoside
  modified_base order(1..4,7..10,15,17,20,22..23,25..28,30..38): mod_base = OTHER; note = 2-Prime-O-Methyl modified nucleoside
  modified_base order(1^2,37^38): mod_base = OTHER; note = (1,3-dimethylimidazolidin-2-ylidene) Phosphoramidate linkage
  modified_base order(2..14,15..37): mod_base = OTHER; note = Phosphorothioate linkage
  modified_base 14^15: mod_base = OTHER; note = Methylphosphonate linkage
  misc_feature 1..38: note = RM109854

SEQ ID NO: 1080 - DNA, 38 bp, synthetic construct; identical to SEQ ID NO: 1071
  source 1..38: mol_type = other DNA
  misc_feature 13..14: note = DNA
  misc_feature order(1..12,15..38): note = RNA
  modified_base 12: mod_base = OTHER; note = 2-Prime-O-Methoxyethyl modified 5-methyl Cytidine
  modified_base 13: mod_base = OTHER; note = DNA nucleotide carrying a 6-amino-5-nitro-3-yl-2(1H)-pyridone nucleobase
  modified_base 14: mod_base = OTHER; note = DNA nucleotide carrying a hypoxanthine nucleobase
  modified_base order(9,16,24): mod_base = OTHER; note = 2-Prime-Fluoro modified nucleoside
  modified_base order(1..8,10..11,15,17..23,25..38): mod_base = OTHER; note = 2-Prime-O-Methyl modified nucleoside
  modified_base order(1^2,37^38): mod_base = OTHER; note = (1,3-dimethylimidazolidin-2-ylidene) Phosphoramidate linkage
  modified_base order(2..14,15..37): mod_base = OTHER; note = Phosphorothioate linkage
  modified_base 14^15: mod_base = OTHER; note = Methylphosphonate linkage
  misc_feature 1..38: note = RM109855

SEQ ID NO: 1081 - DNA, 38 bp, synthetic construct; identical to SEQ ID NO: 1071
  source 1..38: mol_type = other DNA
  misc_feature 13..14: note = DNA
  misc_feature order(1..12,15..38): note = RNA
  modified_base 12: mod_base = OTHER; note = 2-Prime-O-Methoxyethyl modified 5-methyl Cytidine
  modified_base 13: mod_base = OTHER; note = DNA nucleotide carrying a 6-amino-5-nitro-3-yl-2(1H)-pyridone nucleobase
  modified_base 14: mod_base = OTHER; note = DNA nucleotide carrying a hypoxanthine nucleobase
  modified_base order(1,6..7,9,16,18): mod_base = OTHER; note = 2-Prime-Fluoro modified nucleoside
  modified_base order(2..5,8,10..11,15,17,19..38): mod_base = OTHER; note = 2-Prime-O-Methyl modified nucleoside
  modified_base order(1^2,37^38): mod_base = OTHER; note = (1,3-dimethylimidazolidin-2-ylidene) Phosphoramidate linkage
  modified_base order(2..14,15..37): mod_base = OTHER; note = Phosphorothioate linkage
  modified_base 14^15: mod_base = OTHER; note = Methylphosphonate linkage
  misc_feature 1..38: note = RM109856

SEQ ID NO: 1082 - DNA, 20 bp, synthetic construct
  source 1..20: mol_type = other DNA
  misc_feature 9..10: note = DNA
  misc_feature order(1..8,11..20): note = RNA
  modified_base 8: mod_base = OTHER; note = 2-Prime-O-Methoxyethyl modified 5-methyl Cytidine
  modified_base 9: mod_base = OTHER; note = DNA nucleotide carrying a 6-amino-5-nitro-3-yl-2(1H)-pyridone nucleobase
  modified_base 10: mod_base = OTHER; note = DNA nucleotide carrying a hypoxanthine nucleobase
  modified_base order(3..4,12,14): mod_base = OTHER; note = 2-Prime-Fluoro modified nucleoside
  modified_base order(1..2,5..7,11,13,15..20): mod_base = OTHER; note = 2-Prime-O-Methyl modified nucleoside
  modified_base order(1^2,19^20): mod_base = OTHER; note = (1,3-dimethylimidazolidin-2-ylidene) Phosphoramidate linkage
  modified_base order(2..10,11..19): mod_base = OTHER; note = Phosphorothioate linkage
  modified_base 10^11: mod_base = OTHER; note = Methylphosphonate linkage
  misc_feature 1..20: note = RM109857
tgccatacnntgccaccagg

SEQ ID NO: 1083 - DNA, 20 bp, synthetic construct
  source 1..20: mol_type = other DNA
  misc_feature 12..13: note = DNA
  misc_feature order(1..11,14..20): note = RNA
  modified_base 11: mod_base = OTHER; note = 2-Prime-O-Methoxyethyl modified 5-methyl Cytidine
  modified_base 12: mod_base = OTHER; note = DNA nucleotide carrying a 6-amino-5-nitro-3-yl-2(1H)-pyridone nucleobase
  modified_base 13: mod_base = OTHER; note = DNA nucleotide carrying a hypoxanthine nucleobase
  modified_base order(5,8,10,15,17,19): mod_base = OTHER; note = 2-Prime-Fluoro modified nucleoside
  modified_base order(1..4,6..7,9,14,16,18,20): mod_base = OTHER; note = 2-Prime-O-Methyl modified nucleoside
  modified_base order(1^2,19^20): mod_base = OTHER; note = (1,3-dimethylimidazolidin-2-ylidene) Phosphoramidate linkage
  modified_base order(2..13,14..19): mod_base = OTHER; note = Phosphorothioate linkage
  modified_base 13^14: mod_base = OTHER; note = Methylphosphonate linkage
  misc_feature 1..20: note = RM109858
tgatgccatacnntgccacc

SEQ ID NO: 1084 - DNA, 20 bp, synthetic construct
  source 1..20: mol_type = other DNA
  misc_feature 6..7: note = DNA
  misc_feature order(1..5,8..20): note = RNA
  modified_base 5: mod_base = OTHER; note = 2-Prime-O-Methoxyethyl modified 5-methyl Cytidine
  modified_base 6: mod_base = OTHER; note = DNA nucleotide carrying a 6-amino-5-nitro-3-yl-2(1H)-pyridone nucleobase
  modified_base 7: mod_base = OTHER; note = DNA nucleotide carrying a hypoxanthine nucleobase
  modified_base order(9..10,20): mod_base = OTHER; note = 2-Prime-Fluoro modified nucleoside
  modified_base order(1..4,8,11..19): mod_base = OTHER; note = 2-Prime-O-Methyl modified nucleoside
  modified_base order(1^2,19^20): mod_base = OTHER; note = (1,3-dimethylimidazolidin-2-ylidene) Phosphoramidate linkage
  modified_base order(2..7,8..19): mod_base = OTHER; note = Phosphorothioate linkage
  modified_base 7^8: mod_base = OTHER; note = Methylphosphonate linkage
  misc_feature 1..20: note = RM109859
catacnntgccaccagggcg

SEQ ID NO: 1085 - DNA, 20 bp, synthetic construct
  source 1..20: mol_type = other DNA
  misc_feature 15..16: note = DNA
  misc_feature order(1..14,17..20): note = RNA
  modified_base 14: mod_base = OTHER; note = 2-Prime-O-Methoxyethyl modified 5-methyl Cytidine
  modified_base 15: mod_base = OTHER; note = DNA nucleotide carrying a 6-amino-5-nitro-3-yl-2(1H)-pyridone nucleobase
  modified_base 16: mod_base = OTHER; note = DNA nucleotide carrying a hypoxanthine nucleobase
  modified_base order(1,3,18): mod_base = OTHER; note = 2-Prime-Fluoro modified nucleoside
  modified_base order(2,4..13,17,19..20): mod_base = OTHER; note = 2-Prime-O-Methyl modified nucleoside
  modified_base order(1^2,19^20): mod_base = OTHER; note = (1,3-dimethylimidazolidin-2-ylidene) Phosphoramidate linkage
  modified_base order(2..16,17..19): mod_base = OTHER; note = Phosphorothioate linkage
  modified_base 16^17: mod_base = OTHER; note = Methylphosphonate linkage
  misc_feature 1..20: note = RM109860
gcatgatgccatacnntgcc

SEQ ID NO: 1086 - DNA, 20 bp, synthetic construct
  source 1..20: mol_type = other DNA
  misc_feature 9..10: note = DNA
  misc_feature order(1..8,11..20): note = RNA
  modified_base 8: mod_base = OTHER; note = 2-Prime-O-Methoxyethyl modified 5-methyl Cytidine
  modified_base 9: mod_base = OTHER; note = DNA nucleotide carrying a 6-amino-5-nitro-3-yl-2(1H)-pyridone nucleobase
  modified_base 10: mod_base = OTHER; note = DNA nucleotide carrying a hypoxanthine nucleobase
  modified_base order(3,12): mod_base = OTHER; note = 2-Prime-Fluoro modified nucleoside
  modified_base order(1..2,4..7,11,13..20): mod_base = OTHER; note = 2-Prime-O-Methyl modified nucleoside
  modified_base order(1^2,19^20): mod_base = OTHER; note = (1,3-dimethylimidazolidin-2-ylidene) Phosphoramidate linkage
  modified_base order(2..10,11..19): mod_base = OTHER; note = Phosphorothioate linkage
  modified_base 10^11: mod_base = OTHER; note = Methylphosphonate linkage
  misc_feature 1..20: note = RM109861
tgccatacnntgccaccagg

SEQ ID NO: 1087 - DNA, 20 bp, synthetic construct
  source 1..20: mol_type = other DNA
  misc_feature 6..7: note = DNA
  misc_feature order(1..5,8..20): note = RNA
  modified_base 5: mod_base = OTHER; note = 2-Prime-O-Methoxyethyl modified 5-methyl Cytidine
  modified_base 6: mod_base = OTHER; note = DNA nucleotide carrying a 6-amino-5-nitro-3-yl-2(1H)-pyridone nucleobase
  modified_base 7: mod_base = OTHER; note = DNA nucleotide carrying a hypoxanthine nucleobase
  modified_base order(3..4,9,11,18..19): mod_base = OTHER; note = 2-Prime-Fluoro modified nucleoside
  modified_base order(1..2,8,10,12..17,20): mod_base = OTHER; note = 2-Prime-O-Methyl modified nucleoside
  modified_base order(1^2,19^20): mod_base = OTHER; note = (1,3-dimethylimidazolidin-2-ylidene) Phosphoramidate linkage
  modified_base order(2..7,8..19): mod_base = OTHER; note = Phosphorothioate linkage
  modified_base 7^8: mod_base = OTHER; note = Methylphosphonate linkage
  misc_feature 1..20: note = RM109862
catacnntgccaccagggcg

SEQ ID NO: 1088 - DNA, 20 bp, synthetic construct
  source 1..20: mol_type = other DNA
  misc_feature 15..16: note = DNA
  misc_feature order(1..14,17..20): note = RNA
  modified_base 14: mod_base = OTHER; note = 2-Prime-O-Methoxyethyl modified 5-methyl Cytidine
  modified_base 15: mod_base = OTHER; note = DNA nucleotide carrying a 6-amino-5-nitro-3-yl-2(1H)-pyridone nucleobase
  modified_base 16: mod_base = OTHER; note = DNA nucleotide carrying a hypoxanthine nucleobase
  modified_base order(8,11,18): mod_base = OTHER; note = 2-Prime-Fluoro modified nucleoside
  modified_base order(1..7,9..10,12..13,17,19..20): mod_base = OTHER; note = 2-Prime-O-Methyl modified nucleoside
  modified_base order(1^2,19^20): mod_base = OTHER; note = (1,3-dimethylimidazolidin-2-ylidene) Phosphoramidate linkage
  modified_base order(2..16,17..19): mod_base = OTHER; note = Phosphorothioate linkage
  modified_base 16^17: mod_base = OTHER; note = Methylphosphonate linkage
  misc_feature 1..20: note = RM109863
gcatgatgccatacnntgcc

SEQ ID NO: 1089 - DNA, 20 bp, synthetic construct
  source 1..20: mol_type = other DNA
  misc_feature 12..13: note = DNA
  misc_feature order(1..11,14..20): note = RNA
  modified_base 11: mod_base = OTHER; note = 2-Prime-O-Methoxyethyl modified 5-methyl Cytidine
  modified_base 12: mod_base = OTHER; note = DNA nucleotide carrying a 6-amino-5-nitro-3-yl-2(1H)-pyridone nucleobase
  modified_base 13: mod_base = OTHER; note = DNA nucleotide carrying a hypoxanthine nucleobase
  modified_base order(1,15): mod_base = OTHER; note = 2-Prime-Fluoro modified nucleoside
  modified_base order(2..10,14,16..20): mod_base = OTHER; note = 2-Prime-O-Methyl modified nucleoside
  modified_base order(1^2,19^20): mod_base = OTHER; note = (1,3-dimethylimidazolidin-2-ylidene) Phosphoramidate linkage
  modified_base order(2..13,14..19): mod_base = OTHER; note = Phosphorothioate linkage
  modified_base 13^14: mod_base = OTHER; note = Methylphosphonate linkage
  misc_feature 1..20: note = RM109864
tgatgccatacnntgccacc

SEQ ID NO: 1090 - DNA, 20 bp, synthetic construct
  source 1..20: mol_type = other DNA
  misc_feature 9..10: note = DNA
  misc_feature order(1..8,11..20): note = RNA
  modified_base 8: mod_base = OTHER; note = 2-Prime-O-Methoxyethyl modified 5-methyl Cytidine
  modified_base 9: mod_base = OTHER; note = DNA nucleotide carrying a 6-amino-5-nitro-3-yl-2(1H)-pyridone nucleobase
  modified_base 10: mod_base = OTHER; note = DNA nucleotide carrying a hypoxanthine nucleobase
  modified_base order(3,12..13,17..18): mod_base = OTHER; note = 2-Prime-Fluoro modified nucleoside
  modified_base order(1..2,4..7,11,14..16,19..20): mod_base = OTHER; note = 2-Prime-O-Methyl modified nucleoside
  modified_base order(1^2,19^20): mod_base = OTHER; note = (1,3-dimethylimidazolidin-2-ylidene) Phosphoramidate linkage
  modified_base order(2..10,11..19): mod_base = OTHER; note = Phosphorothioate linkage
  modified_base 10^11: mod_base = OTHER; note = Methylphosphonate linkage
  misc_feature 1..20: note = RM109865
tgccatacnntgccaccagg

SEQ ID NO: 1091 - DNA, 20 bp, synthetic construct
  source 1..20: mol_type = other DNA
  misc_feature 15..16: note = DNA
  misc_feature order(1..14,17..20): note = RNA
  modified_base 14: mod_base = OTHER; note = 2-Prime-O-Methoxyethyl modified 5-methyl Cytidine
  modified_base 15: mod_base = OTHER; note = DNA nucleotide carrying a 6-amino-5-nitro-3-yl-2(1H)-pyridone nucleobase
  modified_base 16: mod_base = OTHER; note = DNA nucleotide carrying a hypoxanthine nucleobase
  modified_base order(4..5,9..10,18,20): mod_base = OTHER; note = 2-Prime-Fluoro modified nucleoside
  modified_base order(1..3,6..8,11..13,17,19): mod_base = OTHER; note = 2-Prime-O-Methyl modified nucleoside
  modified_base order(1^2,19^20): mod_base = OTHER; note = (1,3-dimethylimidazolidin-2-ylidene) Phosphoramidate linkage
  modified_base order(2..16,17..19): mod_base = OTHER; note = Phosphorothioate linkage
  modified_base 16^17: mod_base = OTHER; note = Methylphosphonate linkage
  misc_feature 1..20: note = RM109866
gcatgatgccatacnntgcc

SEQ ID NO: 1092 - DNA, 20 bp, synthetic construct
  source 1..20: mol_type = other DNA
  misc_feature 15..16: note = DNA
  misc_feature order(1..14,17..20): note = RNA
  modified_base 14: mod_base = OTHER; note = 2-Prime-O-Methoxyethyl modified 5-methyl Cytidine
  modified_base 15: mod_base = OTHER; note = DNA nucleotide carrying a 6-amino-5-nitro-3-yl-2(1H)-pyridone nucleobase
  modified_base 16: mod_base = OTHER; note = DNA nucleotide carrying a hypoxanthine nucleobase
  modified_base order(9,11,18,20): mod_base = OTHER; note = 2-Prime-Fluoro modified nucleoside
  modified_base order(1..8,10,12..13,17,19): mod_base = OTHER; note = 2-Prime-O-Methyl modified nucleoside
  modified_base order(1^2,19^20): mod_base = OTHER; note = (1,3-dimethylimidazolidin-2-ylidene) Phosphoramidate linkage
  modified_base order(2..16,17..19): mod_base = OTHER; note = Phosphorothioate linkage
  modified_base 16^17: mod_base = OTHER; note = Methylphosphonate linkage
  misc_feature 1..20: note = RM109867
gcatgatgccatacnntgcc

SEQ ID NO: 1093 - DNA, 20 bp, synthetic construct
  source 1..20: mol_type = other DNA
  misc_feature 12..13: note = DNA
  misc_feature order(1..11,14..20): note = RNA
  modified_base 11: mod_base = OTHER; note = 2-Prime-O-Methoxyethyl modified 5-methyl Cytidine
  modified_base 12: mod_base = OTHER; note = DNA nucleotide carrying a 6-amino-5-nitro-3-yl-2(1H)-pyridone nucleobase
  modified_base 13: mod_base = OTHER; note = DNA nucleotide carrying a hypoxanthine nucleobase
  modified_base order(10,15..16): mod_base = OTHER; note = 2-Prime-Fluoro modified nucleoside
  modified_base order(1..9,14,17..20): mod_base = OTHER; note = 2-Prime-O-Methyl modified nucleoside
  modified_base order(1^2,19^20): mod_base = OTHER; note = (1,3-dimethylimidazolidin-2-ylidene) Phosphoramidate linkage
  modified_base order(2..13,14..19): mod_base = OTHER; note = Phosphorothioate linkage
  modified_base 13^14: mod_base = OTHER; note = Methylphosphonate linkage
  misc_feature 1..20: note = RM109868
tgatgccatacnntgccacc

SEQ ID NO: 1094 - DNA, 20 bp, synthetic construct
  source 1..20: mol_type = other DNA
  misc_feature 12..13: note = DNA
  misc_feature order(1..11,14..20): note = RNA
  modified_base 11: mod_base = OTHER; note = 2-Prime-O-Methoxyethyl modified 5-methyl Cytidine
  modified_base 12: mod_base = OTHER; note = DNA nucleotide carrying a 6-amino-5-nitro-3-yl-2(1H)-pyridone nucleobase
  modified_base 13: mod_base = OTHER; note = DNA nucleotide carrying a hypoxanthine nucleobase
  modified_base order(10,15,17..18,20): mod_base = OTHER; note = 2-Prime-Fluoro modified nucleoside
  modified_base order(1..9,14,16,19): mod_base = OTHER; note = 2-Prime-O-Methyl modified nucleoside
  modified_base order(1^2,19^20): mod_base = OTHER; note = (1,3-dimethylimidazolidin-2-ylidene) Phosphoramidate linkage
  modified_base order(2..13,14..19): mod_base = OTHER; note = Phosphorothioate linkage
  modified_base 13^14: mod_base = OTHER; note = Methylphosphonate linkage
  misc_feature 1..20: note = RM109869
tgatgccatacnntgccacc

SEQ ID NO: 1095 - DNA, 20 bp, synthetic construct
  source 1..20: mol_type = other DNA
  misc_feature 12..13: note = DNA
  misc_feature order(1..11,14..20): note = RNA
  modified_base 11: mod_base = OTHER; note = 2-Prime-O-Methoxyethyl modified 5-methyl Cytidine
  modified_base 12: mod_base = OTHER; note = DNA nucleotide carrying a 6-amino-5-nitro-3-yl-2(1H)-pyridone nucleobase
  modified_base 13: mod_base = OTHER; note = DNA nucleotide carrying a hypoxanthine nucleobase
  modified_base order(4..6,9,15..16): mod_base = OTHER; note = 2-Prime-Fluoro modified nucleoside
  modified_base order(1..3,7..8,10,14,17..20): mod_base = OTHER; note = 2-Prime-O-Methyl modified nucleoside
  modified_base order(1^2,19^20): mod_base = OTHER; note = (1,3-dimethylimidazolidin-2-ylidene) Phosphoramidate linkage
  modified_base order(2..13,14..19): mod_base = OTHER; note = Phosphorothioate linkage
  modified_base 13^14: mod_base = OTHER; note = Methylphosphonate linkage
  misc_feature 1..20: note = RM109870
tgatgccatacnntgccacc

SEQ ID NO: 1096 - DNA, 20 bp, synthetic construct
  source 1..20: mol_type = other DNA
  misc_feature 6..7: note = DNA
  misc_feature order(1..5,8..20): note = RNA
  modified_base 5: mod_base = OTHER; note = 2-Prime-O-Methoxyethyl modified 5-methyl Cytidine
  modified_base 6: mod_base = OTHER; note = DNA nucleotide carrying a 6-amino-5-nitro-3-yl-2(1H)-pyridone nucleobase
  modified_base 7: mod_base = OTHER; note = DNA nucleotide carrying a hypoxanthine nucleobase
  modified_base order(1,9): mod_base = OTHER; note = 2-Prime-Fluoro modified nucleoside
  modified_base order(2..4,8,10..20): mod_base = OTHER; note = 2-Prime-O-Methyl modified nucleoside
  modified_base order(1^2,19^20): mod_base = OTHER; note = (1,3-dimethylimidazolidin-2-ylidene) Phosphoramidate linkage
  modified_base order(2..7,8..19): mod_base = OTHER; note = Phosphorothioate linkage
  modified_base 7^8: mod_base = OTHER; note = Methylphosphonate linkage
  misc_feature 1..20: note = RM109871
catacnntgccaccagggcg

SEQ ID NO: 1097 - DNA, 32 bp, synthetic construct; identical to SEQ ID NO: 190
  source 1..32: mol_type = other DNA
  misc_feature 12..14: note = DNA
  misc_feature order(1..11,15..32): note = RNA
  modified_base 13: mod_base = OTHER; note = DNA nucleotide carrying a 6-amino-5-nitro-3-yl-2(1H)-pyridone nucleobase
  modified_base 14: mod_base = OTHER; note = DNA nucleotide carrying a hypoxanthine nucleobase
  modified_base order(9,16..17): mod_base = OTHER; note = 2-Prime-Fluoro modified nucleoside
  modified_base order(1..8,10..11,15,18..32): mod_base = OTHER; note = 2-Prime-O-Methyl modified nucleoside
  modified_base order(1^2,31^32): mod_base = OTHER; note = (1,3-dimethylimidazolidin-2-ylidene) Phosphoramidate linkage
  modified_base order(2..14,15..31): mod_base = OTHER; note = Phosphorothioate linkage
  modified_base 14^15: mod_base = OTHER; note = Methylphosphonate linkage
  misc_feature 1..32: note = RM109872

SEQ ID NO: 1098 - DNA, 32 bp, synthetic construct; identical to SEQ ID NO: 191
  source 1..32: mol_type = other DNA
  misc_feature 9..11: note = DNA
  misc_feature order(1..8,12..32): note = RNA
  modified_base 10: mod_base = OTHER; note = DNA nucleotide carrying a 6-amino-5-nitro-3-yl-2(1H)-pyridone nucleobase
  modified_base 11: mod_base = OTHER; note = DNA nucleotide carrying a hypoxanthine nucleobase
  modified_base order(8,13,16): mod_base = OTHER; note = 2-Prime-Fluoro modified nucleoside
  modified_base order(1..7,12,14..15,17..32): mod_base = OTHER; note = 2-Prime-O-Methyl modified nucleoside
  modified_base order(1^2,31^32): mod_base = OTHER; note = (1,3-dimethylimidazolidin-2-ylidene) Phosphoramidate linkage
  modified_base order(2..11,12..31): mod_base = OTHER; note = Phosphorothioate linkage
  modified_base 11^12: mod_base = OTHER; note = Methylphosphonate linkage
  misc_feature 1..32: note = RM109873

SEQ ID NO: 1099 - DNA, 32 bp, synthetic construct; identical to SEQ ID NO: 190
  source 1..32: mol_type = other DNA
  misc_feature 12..14: note = DNA
  misc_feature order(1..11,15..32): note = RNA
  modified_base 13: mod_base = OTHER; note = DNA nucleotide carrying a 6-amino-5-nitro-3-yl-2(1H)-pyridone nucleobase
  modified_base 14: mod_base = OTHER; note = DNA nucleotide carrying a hypoxanthine nucleobase
  modified_base order(11,16,19): mod_base = OTHER; note = 2-Prime-Fluoro modified nucleoside
  modified_base order(1..10,15,17..18,20..32): mod_base = OTHER; note = 2-Prime-O-Methyl modified nucleoside
  modified_base order(1^2,31^32): mod_base = OTHER; note = (1,3-dimethylimidazolidin-2-ylidene) Phosphoramidate linkage
  modified_base order(2..14,15..31): mod_base = OTHER; note = Phosphorothioate linkage
  modified_base 14^15: mod_base = OTHER; note = Methylphosphonate linkage
  misc_feature 1..32: note = RM109874

SEQ ID NO: 1100 - DNA, 32 bp, synthetic construct; identical to SEQ ID NO: 192
  source 1..32: mol_type = other DNA
  misc_feature 6..8: note = DNA
  misc_feature order(1..5,9..32): note = RNA
  modified_base 7: mod_base = OTHER; note = DNA nucleotide carrying a 6-amino-5-nitro-3-yl-2(1H)-pyridone nucleobase
  modified_base 8: mod_base = OTHER; note = DNA nucleotide carrying a hypoxanthine nucleobase
  modified_base order(3,10..11): mod_base = OTHER; note = 2-Prime-Fluoro modified nucleoside
  modified_base order(1..2,4..5,9,12..32): mod_base = OTHER; note = 2-Prime-O-Methyl modified nucleoside
  modified_base order(1^2,31^32): mod_base = OTHER; note = (1,3-dimethylimidazolidin-2-ylidene) Phosphoramidate linkage
  modified_base order(2..8,9..31): mod_base = OTHER; note = Phosphorothioate linkage
  modified_base 8^9: mod_base = OTHER; note = Methylphosphonate linkage
  misc_feature 1..32: note = RM109875

SEQ ID NO: 1101 - DNA, 29 bp, synthetic construct
  source 1..29: mol_type = other DNA
  misc_feature 20..22: note = DNA
  misc_feature order(1..19,23..29): note = RNA
  modified_base 21: mod_base = OTHER; note = DNA nucleotide carrying a 6-amino-5-nitro-3-yl-2(1H)-pyridone nucleobase
  modified_base 22: mod_base = OTHER; note = DNA nucleotide carrying a hypoxanthine nucleobase
  modified_base order(14,24): mod_base = OTHER; note = 2-Prime-Fluoro modified nucleoside
  modified_base order(1..13,15..19,23,25..29): mod_base = OTHER; note = 2-Prime-O-Methyl modified nucleoside
  modified_base order(1^2,28^29): mod_base = OTHER; note = (1,3-dimethylimidazolidin-2-ylidene) Phosphoramidate linkage
  modified_base order(2..22,23..28): mod_base = OTHER; note = Phosphorothioate linkage
  modified_base 22^23: mod_base = OTHER; note = Methylphosphonate linkage
  misc_feature 1..29: note = RM109876
tgaggggcatgatgccatacnntgccacc

SEQ ID NO: 1102 - DNA, 23 bp, synthetic construct
  source 1..23: mol_type = other DNA
  misc_feature 18..19: note = DNA
  misc_feature order(1..17,20..23): note = RNA
  modified_base 17: mod_base = OTHER; note = 2-Prime-O-Methoxyethyl modified 5-methyl Cytidine
  modified_base 18: mod_base = OTHER; note = DNA nucleotide carrying a 6-amino-5-nitro-3-yl-2(1H)-pyridone nucleobase
  modified_base 19: mod_base = OTHER; note = DNA nucleotide carrying a hypoxanthine nucleobase
  modified_base order(12,14,21,23): mod_base = OTHER; note = 2-Prime-Fluoro modified nucleoside
  modified_base order(1..11,13,15..16,20,22): mod_base = OTHER; note = 2-Prime-O-Methyl modified nucleoside
  modified_base order(1^2,22^23): mod_base = OTHER; note = (1,3-dimethylimidazolidin-2-ylidene) Phosphoramidate linkage
  modified_base 17..19: mod_base = OTHER; note = Phosphorothioate linkage
  modified_base 19^20: mod_base = OTHER; note = Methylphosphonate linkage
  misc_feature 1..23: note = RM109877
ggggcatgatgccatacnntgcc

SEQ ID NO: 1103 - DNA, 26 bp, synthetic construct
  source 1..26: mol_type = other DNA
  misc_feature 16..17: note = DNA
  misc_feature order(1..15,18..26): note = RNA
  modified_base 15: mod_base = OTHER; note = 2-Prime-O-Methoxyethyl modified 5-methyl Cytidine
  modified_base 16: mod_base = OTHER; note = DNA nucleotide carrying a 6-amino-5-nitro-3-yl-2(1H)-pyridone nucleobase
  modified_base 17: mod_base = OTHER; note = DNA nucleotide carrying a hypoxanthine nucleobase
  modified_base order(7,19): mod_base = OTHER; note = 2-Prime-Fluoro modified nucleoside
  modified_base order(1..6,8..14,18,20..26): mod_base = OTHER; note = 2-Prime-O-Methyl modified nucleoside
  modified_base order(1^2,25^26): mod_base = OTHER; note = (1,3-dimethylimidazolidin-2-ylidene) Phosphoramidate linkage
  modified_base 15..17: mod_base = OTHER; note = Phosphorothioate linkage
  modified_base 17^18: mod_base = OTHER; note = Methylphosphonate linkage
  misc_feature 1..26: note = RM109878
ggcatgatgccatacnntgccaccag

SEQ ID NO: 1104 - DNA, 23 bp, synthetic construct
  source 1..23: mol_type = other DNA
  misc_feature 18..19: note = DNA
  misc_feature order(1..17,20..23): note = RNA
  modified_base 17: mod_base = OTHER; note = 2-Prime-O-Methoxyethyl modified 5-methyl Cytidine
  modified_base 18: mod_base = OTHER; note = DNA nucleotide carrying a 6-amino-5-nitro-3-yl-2(1H)-pyridone nucleobase
  modified_base 19: mod_base = OTHER; note = DNA nucleotide carrying a hypoxanthine nucleobase
  modified_base order(4,10,21,23): mod_base = OTHER; note = 2-Prime-Fluoro modified nucleoside
  modified_base order(1..3,5..9,11..16,20,22): mod_base = OTHER; note = 2-Prime-O-Methyl modified nucleoside
  modified_base order(1^2,22^23): mod_base = OTHER; note = (1,3-dimethylimidazolidin-2-ylidene) Phosphoramidate linkage
  modified_base 17..19: mod_base = OTHER; note = Phosphorothioate linkage
  modified_base 19^20: mod_base = OTHER; note = Methylphosphonate linkage
  misc_feature 1..23: note = RM109879
ggggcatgatgccatacnntgcc

SEQ ID NO: 1105 - DNA, 32 bp, synthetic construct; identical to SEQ ID NO: 190
  source 1..32: mol_type = other DNA
  misc_feature 13..14: note = DNA
  misc_feature order(1..12,15..32): note = RNA
  modified_base 12: mod_base = OTHER; note = 2-Prime-O-Methoxyethyl modified 5-methyl Cytidine
  modified_base 13: mod_base = OTHER; note = DNA nucleotide carrying a 6-amino-5-nitro-3-yl-2(1H)-pyridone nucleobase
  modified_base 14: mod_base = OTHER; note = DNA nucleotide carrying a hypoxanthine nucleobase
  modified_base order(3..4,7,16..17,21..22,25,28): mod_base = OTHER; note = 2-Prime-Fluoro modified nucleoside
  modified_base order(1..2,5..6,8..11,15,18..20,23..24,26..27,29..32): mod_base = OTHER; note = 2-Prime-O-Methyl modified nucleoside
  modified_base order(1^2,31^32): mod_base = OTHER; note = (1,3-dimethylimidazolidin-2-ylidene) Phosphoramidate linkage
  modified_base 12..14: mod_base = OTHER; note = Phosphorothioate linkage
  modified_base 14^15: mod_base = OTHER; note = Methylphosphonate linkage
  misc_feature 1..32: note = RM109880

SEQ ID NO: 1106 - DNA, 32 bp, synthetic construct; identical to SEQ ID NO: 190
  source 1..32: mol_type = other DNA
  misc_feature 13..14: note = DNA
  misc_feature order(1..12,15..32): note = RNA
  modified_base 12: mod_base = OTHER; note = 2-Prime-O-Methoxyethyl modified 5-methyl Cytidine
  modified_base 13: mod_base = OTHER; note = DNA nucleotide carrying a 6-amino-5-nitro-3-yl-2(1H)-pyridone nucleobase
  modified_base 14: mod_base = OTHER; note = DNA nucleotide carrying a hypoxanthine nucleobase
  modified_base order(1,6..7,9,16,18): mod_base = OTHER; note = 2-Prime-Fluoro modified nucleoside
  modified_base order(2..5,8,10..11,15,17,19..32): mod_base = OTHER; note = 2-Prime-O-Methyl modified nucleoside
  modified_base order(1^2,31^32): mod_base = OTHER; note = (1,3-dimethylimidazolidin-2-ylidene) Phosphoramidate linkage
  modified_base 12..14: mod_base = OTHER; note = Phosphorothioate linkage
  modified_base 14^15: mod_base = OTHER; note = Methylphosphonate linkage
  misc_feature 1..32: note = RM109881

SEQ ID NO: 1107 - DNA, 26 bp, synthetic construct
  source 1..26: mol_type = other DNA
  misc_feature 16..17: note = DNA
  misc_feature order(1..15,18..26): note = RNA
  modified_base 15: mod_base = OTHER; note = 2-Prime-O-Methoxyethyl modified 5-methyl Cytidine
  modified_base 16: mod_base = OTHER; note = DNA nucleotide carrying a 6-amino-5-nitro-3-yl-2(1H)-pyridone nucleobase
  modified_base 17: mod_base = OTHER; note = DNA nucleotide carrying a hypoxanthine nucleobase
  modified_base order(2..3,6..7,19): mod_base = OTHER; note = 2-Prime-Fluoro modified nucleoside
  modified_base order(1,4..5,8..14,18,20..26): mod_base = OTHER; note = 2-Prime-O-Methyl modified nucleoside
  modified_base order(1^2,25^26): mod_base = OTHER; note = (1,3-dimethylimidazolidin-2-ylidene) Phosphoramidate linkage
  modified_base 15..17: mod_base = OTHER; note = Phosphorothioate linkage
  modified_base 17^18: mod_base = OTHER; note = Methylphosphonate linkage
  misc_feature 1..26: note = RM109882
ggcatgatgccatacnntgccaccag

SEQ ID NO: 1108 - DNA, 26 bp, synthetic construct
  source 1..26: mol_type = other DNA
  misc_feature 16..17: note = DNA
  misc_feature order(1..15,18..26): note = RNA
  modified_base 15: mod_base = OTHER; note = 2-Prime-O-Methoxyethyl modified 5-methyl Cytidine
  modified_base 16: mod_base = OTHER; note = DNA nucleotide carrying a 6-amino-5-nitro-3-yl-2(1H)-pyridone nucleobase
  modified_base 17: mod_base = OTHER; note = DNA nucleotide carrying a hypoxanthine nucleobase
  modified_base order(1..2,12,19..20,24..25): mod_base = OTHER; note = 2-Prime-Fluoro modified nucleoside
  modified_base order(3..11,13..14,18,21..23,26): mod_base = OTHER; note = 2-Prime-O-Methyl modified nucleoside
  modified_base order(1^2,25^26): mod_base = OTHER; note = (1,3-dimethylimidazolidin-2-ylidene) Phosphoramidate linkage
  modified_base 15..17: mod_base = OTHER; note = Phosphorothioate linkage
  modified_base 17^18: mod_base = OTHER; note = Methylphosphonate linkage
  misc_feature 1..26: note = RM109883
ggcatgatgccatacnntgccaccag

SEQ ID NO: 1109 - DNA, 23 bp, synthetic construct
  source 1..23: mol_type = other DNA
  misc_feature 18..19: note = DNA
  misc_feature order(1..17,20..23): note = RNA
  modified_base 17: mod_base = OTHER; note = 2-Prime-O-Methoxyethyl modified 5-methyl Cytidine
  modified_base 18: mod_base = OTHER; note = DNA nucleotide carrying a 6-amino-5-nitro-3-yl-2(1H)-pyridone nucleobase
  modified_base 19: mod_base = OTHER; note = DNA nucleotide carrying a hypoxanthine nucleobase
  modified_base order(9,12,14..15,21..22): mod_base = OTHER; note = 2-Prime-Fluoro modified nucleoside
  modified_base order(1..8,10..11,13,16,20,23): mod_base = OTHER; note = 2-Prime-O-Methyl modified nucleoside
  modified_base order(1^2,22^23): mod_base = OTHER; note = (1,3-dimethylimidazolidin-2-ylidene) Phosphoramidate linkage
  modified_base 17..19: mod_base = OTHER; note = Phosphorothioate linkage
  modified_base 19^20: mod_base = OTHER; note = Methylphosphonate linkage
  misc_feature 1..23: note = RM109884
ggggcatgatgccatacnntgcc

SEQ ID NO: 1110 - DNA, 23 bp, synthetic construct
  source 1..23: mol_type = other DNA
  misc_feature 12..13: note = DNA
  misc_feature order(1..11,14..23): note = RNA
  modified_base 11: mod_base = OTHER; note = 2-Prime-O-Methoxyethyl modified 5-methyl Cytidine
  modified_base 12: mod_base = OTHER; note = DNA nucleotide carrying a 6-amino-5-nitro-3-yl-2(1H)-pyridone nucleobase
  modified_base 13: mod_base = OTHER; note = DNA nucleotide carrying a hypoxanthine nucleobase
  modified_base order(6,8,15,17): mod_base = OTHER; note = 2-Prime-Fluoro modified nucleoside
  modified_base order(1..5,7,9..10,14,16,18..23): mod_base = OTHER; note = 2-Prime-O-Methyl modified nucleoside
  modified_base order(1^2,22^23): mod_base = OTHER; note = (1,3-dimethylimidazolidin-2-ylidene) Phosphoramidate linkage
  modified_base 11..13: mod_base = OTHER; note = Phosphorothioate linkage
  modified_base 13^14: mod_base = OTHER; note = Methylphosphonate linkage
  misc_feature 1..23: note = RM109885
tgatgccatacnntgccaccagg

SEQ ID NO: 1111 - DNA, 29 bp, synthetic construct
  source 1..29: mol_type = other DNA
  misc_feature 9..10: note = DNA
  misc_feature order(1..8,11..29): note = RNA
  modified_base 8: mod_base = OTHER; note = 2-Prime-O-Methoxyethyl modified 5-methyl Cytidine
  modified_base 9: mod_base = OTHER; note = DNA nucleotide carrying a 6-amino-5-nitro-3-yl-2(1H)-pyridone nucleobase
  modified_base 10: mod_base = OTHER; note = DNA nucleotide carrying a hypoxanthine nucleobase
  modified_base order(2,12): mod_base = OTHER; note = 2-Prime-Fluoro modified nucleoside
  modified_base order(1,3..7,11,13..29): mod_base = OTHER; note = 2-Prime-O-Methyl modified nucleoside
  modified_base order(1^2,28^29): mod_base = OTHER; note = (1,3-dimethylimidazolidin-2-ylidene) Phosphoramidate linkage
  modified_base 8..10: mod_base = OTHER; note = Phosphorothioate linkage
  modified_base 10^11: mod_base = OTHER; note = Methylphosphonate linkage
  misc_feature 1..29: note = RM109886
tgccatacnntgccaccagggcgatggcc

SEQ ID NO: 1112 - DNA, 32 bp, synthetic construct; identical to SEQ ID NO: 190
  source 1..32: mol_type = other DNA
  misc_feature 13..14: note = DNA
  misc_feature order(1..12,15..32): note = RNA
  modified_base 12: mod_base = OTHER; note = 2-Prime-O-Methoxyethyl modified 5-methyl Cytidine
  modified_base 13: mod_base = OTHER; note = DNA nucleotide carrying a 6-amino-5-nitro-3-yl-2(1H)-pyridone nucleobase
  modified_base 14: mod_base = OTHER; note = DNA nucleotide carrying a hypoxanthine nucleobase
  modified_base order(3..4,7,16..17,21..22,25,28): mod_base = OTHER; note = 2-Prime-Fluoro modified nucleoside
  modified_base order(1..2,5..6,8..11,15,18..20,23..24,26..27,29..32): mod_base = OTHER; note = 2-Prime-O-Methyl modified nucleoside
  modified_base order(1^2,31^32): mod_base = OTHER; note = (1,3-dimethylimidazolidin-2-ylidene) Phosphoramidate linkage
  modified_base order(3..5,7^8,12..14,16..18,21..23,25^26,28^29): mod_base = OTHER; note = Phosphorothioate linkage
  modified_base 14^15: mod_base = OTHER; note = Methylphosphonate linkage
  misc_feature 1..32: note = RM109887

SEQ ID NO: 1113 - DNA, 23 bp, synthetic construct
  source 1..23: mol_type = other DNA
  misc_feature 18..19: note = DNA
  misc_feature order(1..17,20..23): note = RNA
  modified_base 17: mod_base = OTHER; note = 2-Prime-O-Methoxyethyl modified 5-methyl Cytidine
  modified_base 18: mod_base = OTHER; note = DNA nucleotide carrying a 6-amino-5-nitro-3-yl-2(1H)-pyridone nucleobase
  modified_base 19: mod_base = OTHER; note = DNA nucleotide carrying a hypoxanthine nucleobase
  modified_base order(12,14,21,23): mod_base = OTHER; note = 2-Prime-Fluoro modified nucleoside
  modified_base order(1..11,13,15..16,20,22): mod_base = OTHER; note = 2-Prime-O-Methyl modified nucleoside
  modified_base order(1^2,22^23): mod_base = OTHER; note = (1,3-dimethylimidazolidin-2-ylidene) Phosphoramidate linkage
  modified_base order(12^13,14^15,17..19,21^22): mod_base = OTHER; note = Phosphorothioate linkage
  modified_base 19^20: mod_base = OTHER; note = Methylphosphonate linkage
  misc_feature 1..23: note = RM109888
ggggcatgatgccatacnntgcc

SEQ ID NO: 1114 - DNA, 23 bp, synthetic construct
  source 1..23: mol_type = other DNA
  misc_feature 12..13: note = DNA
  misc_feature order(1..11,14..23): note = RNA
  modified_base 11: mod_base = OTHER; note = 2-Prime-O-Methoxyethyl modified 5-methyl Cytidine
  modified_base 12: mod_base = OTHER; note = DNA nucleotide carrying a 6-amino-5-nitro-3-yl-2(1H)-pyridone nucleobase
  modified_base 13: mod_base = OTHER; note = DNA nucleotide carrying a hypoxanthine nucleobase
  modified_base order(6,8,15,17): mod_base = OTHER; note = 2-Prime-Fluoro modified nucleoside
  modified_base order(1..5,7,9..10,14,16,18..23): mod_base = OTHER; note = 2-Prime-O-Methyl modified nucleoside
  modified_base order(1^2,22^23): mod_base = OTHER; note = (1,3-dimethylimidazolidin-2-ylidene) Phosphoramidate linkage
  modified_base order(6^7,8^9,11..13,15^16,17^18): mod_base = OTHER; note = Phosphorothioate linkage
  modified_base 13^14: mod_base = OTHER; note = Methylphosphonate linkage
  misc_feature 1..23: note = RM109889
tgatgccatacnntgccaccagg

SEQ ID NO: 1115 - DNA, 26 bp, synthetic construct
  source 1..26: mol_type = other DNA
  misc_feature 16..17: note = DNA
  misc_feature order(1..15,18..26): note = RNA
  modified_base 15: mod_base = OTHER; note = 2-Prime-O-Methoxyethyl modified 5-methyl Cytidine
  modified_base 16: mod_base = OTHER; note = DNA nucleotide carrying a 6-amino-5-nitro-3-yl-2(1H)-pyridone nucleobase
  modified_base 17: mod_base = OTHER; note = DNA nucleotide carrying a hypoxanthine nucleobase
  modified_base order(7,19): mod_base = OTHER; note = 2-Prime-Fluoro modified nucleoside
  modified_base order(1..6,8..14,18,20..26): mod_base = OTHER; note = 2-Prime-O-Methyl modified nucleoside
  modified_base order(1^2,25^26): mod_base = OTHER; note = (1,3-dimethylimidazolidin-2-ylidene) Phosphoramidate linkage
  modified_base order(7^8,15..17,19^20): mod_base = OTHER; note = Phosphorothioate linkage
  modified_base 17^18: mod_base = OTHER; note = Methylphosphonate linkage
  misc_feature 1..26: note = RM109890
ggcatgatgccatacnntgccaccag

SEQ ID NO: 1116 - DNA, 32 bp, synthetic construct; identical to SEQ ID NO: 190
  source 1..32: mol_type = other DNA
  misc_feature 13..14: note = DNA
  misc_feature order(1..12,15..32): note = RNA
  modified_base 12: mod_base = OTHER; note = 2-Prime-O-Methoxyethyl modified 5-methyl Cytidine
  modified_base 13: mod_base = OTHER; note = DNA nucleotide carrying a 6-amino-5-nitro-3-yl-2(1H)-pyridone nucleobase
  modified_base 14: mod_base = OTHER; note = DNA nucleotide carrying a hypoxanthine nucleobase
  modified_base order(1,6..7,9,16,18): mod_base = OTHER; note = 2-Prime-Fluoro modified nucleoside
  modified_base order(2..5,8,10..11,15,17,19..32): mod_base = OTHER; note = 2-Prime-O-Methyl modified nucleoside
  modified_base order(1^2,31^32): mod_base = OTHER; note = (1,3-dimethylimidazolidin-2-ylidene) Phosphoramidate linkage
  modified_base order(6..8,9^10,12..14,16^17,18^19): mod_base = OTHER; note = Phosphorothioate linkage
  modified_base 14^15: mod_base = OTHER; note = Methylphosphonate linkage
  misc_feature 1..32: note = RM109891

SEQ ID NO: 1117 - DNA, 32 bp, synthetic construct; identical to SEQ ID NO: 190
  source 1..32: mol_type = other DNA
  misc_feature 13..14: note = DNA
  misc_feature order(1..12,15..32): note = RNA
  modified_base 12: mod_base = OTHER; note = 2-Prime-O-Methoxyethyl modified 5-methyl Cytidine
  modified_base 13: mod_base = OTHER; note = DNA nucleotide carrying a 6-amino-5-nitro-3-yl-2(1H)-pyridone nucleobase
  modified_base 14: mod_base = OTHER; note = DNA nucleotide carrying a hypoxanthine nucleobase
  modified_base order(3..4,7,16..17,21..22,25,28): mod_base = OTHER; note = 2-Prime-Fluoro modified nucleoside
  modified_base order(1..2,5..6,8..11,15,18..20,23..24,26..27,29..32): mod_base = OTHER; note = 2-Prime-O-Methyl modified nucleoside
  modified_base order(1^2,31^32): mod_base = OTHER; note = (1,3-dimethylimidazolidin-2-ylidene) Phosphoramidate linkage
  modified_base order(3^4,5^6,7^8,9^10,11..14,15^16,17^18,19^20,21^22,23^24,25^26,27^28,29^30): mod_base = OTHER; note = Phosphorothioate linkage
  modified_base 14^15: mod_base = OTHER; note = Methylphosphonate linkage
  misc_feature 1..32: note = RM109892

SEQ ID NO: 1118 - DNA, 23 bp, synthetic construct
  source 1..23: mol_type = other DNA
  misc_feature 18..19: note = DNA
  misc_feature order(1..17,20..23): note = RNA
  modified_base 17: mod_base = OTHER; note = 2-Prime-O-Methoxyethyl modified 5-methyl Cytidine
  modified_base 18: mod_base = OTHER; note = DNA nucleotide carrying a 6-amino-5-nitro-3-yl-2(1H)-pyridone nucleobase
  modified_base 19: mod_base = OTHER; note = DNA nucleotide carrying a hypoxanthine nucleobase
  modified_base order(12,14,21,23): mod_base = OTHER; note = 2-Prime-Fluoro modified nucleoside
  modified_base order(1..11,13,15..16,20,22): mod_base = OTHER; note = 2-Prime-O-Methyl modified nucleoside
  modified_base order(1^2,22^23): mod_base = OTHER; note = (1,3-dimethylimidazolidin-2-ylidene) Phosphoramidate linkage
  modified_base order(3^4,5^6,7^8,9^10,11^12,13^14,15^16,17..19,21^22): mod_base = OTHER; note = Phosphorothioate linkage
  modified_base 19^20: mod_base = OTHER; note = Methylphosphonate linkage
  misc_feature 1..23: note = RM109893
ggggcatgatgccatacnntgcc

SEQ ID NO: 1119 - DNA, 23 bp, synthetic construct
  source 1..23: mol_type = other DNA
  misc_feature 12..13: note = DNA
  misc_feature order(1..11,14..23): note = RNA
  modified_base 11: mod_base = OTHER; note = 2-Prime-O-Methoxyethyl modified 5-methyl Cytidine
  modified_base 12: mod_base = OTHER; note = DNA nucleotide carrying a 6-amino-5-nitro-3-yl-2(1H)-pyridone nucleobase
  modified_base 13: mod_base = OTHER; note = DNA nucleotide carrying a hypoxanthine nucleobase
  modified_base order(6,8,15,17): mod_base = OTHER; note = 2-Prime-Fluoro modified nucleoside
  modified_base order(1..5,7,9..10,14,16,18..23): mod_base = OTHER; note = 2-Prime-O-Methyl modified nucleoside
  modified_base order(1^2,22^23): mod_base = OTHER; note = (1,3-dimethylimidazolidin-2-ylidene) Phosphoramidate linkage
  modified_base order(3^4,5^6,7^8,9^10,11..13,15^16,17^18,19^20,21^22): mod_base = OTHER; note = Phosphorothioate linkage
  modified_base 13^14: mod_base = OTHER; note = Methylphosphonate linkage
  misc_feature 1..23: note = RM109894
tgatgccatacnntgccaccagg

SEQ ID NO: 1120 - DNA, 26 bp, synthetic construct
  source 1..26: mol_type = other DNA
  misc_feature 16..17: note = DNA
  misc_feature order(1..15,18..26): note = RNA
  modified_base 15: mod_base = OTHER; note = 2-Prime-O-Methoxyethyl modified 5-methyl Cytidine
  modified_base 16: mod_base = OTHER; note = DNA nucleotide carrying a 6-amino-5-nitro-3-yl-2(1H)-pyridone nucleobase
  modified_base 17: mod_base = OTHER; note = DNA nucleotide carrying a hypoxanthine nucleobase
  modified_base order(7,19): mod_base = OTHER; note = 2-Prime-Fluoro modified nucleoside
  modified_base order(1..6,8..14,18,20..26): mod_base = OTHER; note = 2-Prime-O-Methyl modified nucleoside
  modified_base order(1^2,25^26): mod_base = OTHER; note = (1,3-dimethylimidazolidin-2-ylidene) Phosphoramidate linkage
  modified_base order(3^4,5^6,7^8,9^10,11^12,13^14,15..17,19^20,21^22,23^24): mod_base = OTHER; note = Phosphorothioate linkage
  modified_base 17^18: mod_base = OTHER; note = Methylphosphonate linkage
  misc_feature 1..26: note = RM109895
ggcatgatgccatacnntgccaccag

SEQ ID NO: 1121 - DNA, 32 bp, synthetic construct; identical to SEQ ID NO: 190
  source 1..32: mol_type = other DNA
  misc_feature 13..14: note = DNA
  misc_feature order(1..12,15..32): note = RNA
  modified_base 12: mod_base = OTHER; note = 2-Prime-O-Methoxyethyl modified 5-methyl Cytidine
  modified_base 13: mod_base = OTHER; note = DNA nucleotide carrying a 6-amino-5-nitro-3-yl-2(1H)-pyridone nucleobase
  modified_base 14: mod_base = OTHER; note = DNA nucleotide carrying a hypoxanthine nucleobase
  modified_base order(1,6..7,9,16,18): mod_base = OTHER; note = 2-Prime-Fluoro modified nucleoside
  modified_base order(2..5,8,10..11,15,17,19..32): mod_base = OTHER; note = 2-Prime-O-Methyl modified nucleoside
  modified_base order(1^2,31^32): mod_base = OTHER; note = (1,3-dimethylimidazolidin-2-ylidene) Phosphoramidate linkage
  modified_base order(3^4,5^6,7^8,9^10,11..14,15^16,17^18,19^20,21^22,23^24,25^26,27^28,29^30): mod_base = OTHER; note = Phosphorothioate linkage
  modified_base 14^15: mod_base = OTHER; note = Methylphosphonate linkage
  misc_feature 1..32: note = RM109896

SEQ ID NO: 1122 - DNA, 30 bp, synthetic construct; identical to SEQ ID NO: 29
  source 1..30: mol_type = other DNA
  misc_feature 24..25: note = DNA
  misc_feature order(1..23,26..30): note = RNA
  modified_base order(6..7,10,20): mod_base = OTHER; note = 2-Prime-O-Methoxyethyl modified nucleoside
  modified_base order(23,28): mod_base = OTHER; note = 2-Prime-O-Methoxyethyl modified 5-methyl Cytidine
  modified_base order(16,21): mod_base = OTHER; note = 2-Prime-O-Methoxyethyl modified 5-methyl Uridine
  modified_base 24: mod_base = OTHER; note = DNA nucleotide carrying a 6-amino-5-nitro-3-yl-2(1H)-pyridone nucleobase
  modified_base 25: mod_base = OTHER; note = DNA nucleotide carrying a hypoxanthine nucleobase
  modified_base order(4..5,8,13..14,18..19,22,27): mod_base = OTHER; note = 2-Prime-Fluoro modified nucleoside
  modified_base order(1..3,9,11..12,15,17,26,29..30): mod_base = OTHER; note = 2-Prime-O-Methyl modified nucleoside
  modified_base order(1^2,11^12,14^15,19^20,29^30): mod_base = OTHER; note = (1,3-dimethylimidazolidin-2-ylidene) Phosphoramidate linkage
  modified_base order(2..6,8^9,10^11,13^14,17..19,22^23,24^25,27..29): mod_base = OTHER; note = Phosphorothioate linkage
  modified_base 25^26: mod_base = OTHER; note = Methylphosphonate linkage
  misc_feature 1..30: note = RM108832

SEQ ID NO: 1123 - DNA, 31 bp, synthetic construct
  source 1..31: mol_type = other DNA
  misc_feature 25..26: note = DNA
  misc_feature order(1..24,27..31): note = RNA
  modified_base order(7..8,11,21): mod_base = OTHER; note = 2-Prime-O-Methoxyethyl modified nucleoside
  modified_base order(24,29): mod_base = OTHER; note = 2-Prime-O-Methoxyethyl modified 5-methyl Cytidine
  modified_base order(17,22): mod_base = OTHER; note = 2-Prime-O-Methoxyethyl modified 5-methyl Uridine
  modified_base 25: mod_base = OTHER; note = DNA nucleotide carrying a 6-amino-5-nitro-3-yl-2(1H)-pyridone nucleobase
  modified_base 26: mod_base = OTHER; note = DNA nucleotide carrying a hypoxanthine nucleobase
  modified_base order(5..6,9,14..15,19..20,23,28): mod_base = OTHER; note = 2-Prime-Fluoro modified nucleoside
  modified_base order(1..4,10,12..13,16,18,27,30..31): mod_base = OTHER; note = 2-Prime-O-Methyl modified nucleoside
  modified_base order(1^2,12^13,15^16,20^21,30^31): mod_base = OTHER; note = (1,3-dimethylimidazolidin-2-ylidene) Phosphoramidate linkage
  modified_base order(2..7,9^10,11^12,14^15,18..20,23^24,25^26,28..30): mod_base = OTHER; note = Phosphorothioate linkage
  modified_base 26^27: mod_base = OTHER; note = Methylphosphonate linkage
  misc_feature 1..31: note = RM109897
gccgtgaggggcatgatgccatacnntgcca

SEQ ID NO: 1124 - DNA, 30 bp, synthetic construct
  source 1..30: mol_type = other DNA
  misc_feature 25..26: note = DNA
  misc_feature order(1..24,27..30): note = RNA
  modified_base order(7..8,11,21): mod_base = OTHER; note = 2-Prime-O-Methoxyethyl modified nucleoside
  modified_base order(24,29): mod_base = OTHER; note = 2-Prime-O-Methoxyethyl modified 5-methyl Cytidine
  modified_base order(17,22): mod_base = OTHER; note = 2-Prime-O-Methoxyethyl modified 5-methyl Uridine
  modified_base 25: mod_base = OTHER; note = DNA nucleotide carrying a 6-amino-5-nitro-3-yl-2(1H)-pyridone nucleobase
  modified_base 26: mod_base = OTHER; note = DNA nucleotide carrying a hypoxanthine nucleobase
  modified_base order(5..6,9,14..15,19..20,23,28): mod_base = OTHER; note = 2-Prime-Fluoro modified nucleoside
  modified_base order(1..4,10,12..13,16,18,27,30): mod_base = OTHER; note = 2-Prime-O-Methyl modified nucleoside
  modified_base order(1^2,12^13,15^16,20^21,29^30): mod_base = OTHER; note = (1,3-dimethylimidazolidin-2-ylidene) Phosphoramidate linkage
  modified_base order(2..7,9^10,11^12,14^15,18..20,23^24,25^26,28^29): mod_base = OTHER; note = Phosphorothioate linkage
  modified_base 26^27: mod_base = OTHER; note = Methylphosphonate linkage
  misc_feature 1..30: note = RM109898
gccgtgaggggcatgatgccatacnntgcc

SEQ ID NO: 1125 - DNA, 31 bp, synthetic construct
  source 1..31: mol_type = other DNA
  misc_feature 24..25: note = DNA
  misc_feature order(1..23,26..31): note = RNA
  modified_base order(6..7,10,20): mod_base = OTHER; note = 2-Prime-O-Methoxyethyl modified nucleoside
  modified_base order(23,28): mod_base = OTHER; note = 2-Prime-O-Methoxyethyl modified 5-methyl Cytidine
  modified_base order(16,21): mod_base = OTHER; note = 2-Prime-O-Methoxyethyl modified 5-methyl Uridine
  modified_base 24: mod_base = OTHER; note = DNA nucleotide carrying a 6-amino-5-nitro-3-yl-2(1H)-pyridone nucleobase
  modified_base 25: mod_base = OTHER; note = DNA nucleotide carrying a hypoxanthine nucleobase
  modified_base order(4..5,8,13..14,18..19,22,27): mod_base = OTHER; note = 2-Prime-Fluoro modified nucleoside
  modified_base order(1..3,9,11..12,15,17,26,29..31): mod_base = OTHER; note = 2-Prime-O-Methyl modified nucleoside
  modified_base order(1^2,11^12,14^15,19^20,30^31): mod_base = OTHER; note = (1,3-dimethylimidazolidin-2-ylidene) Phosphoramidate linkage
  modified_base order(2..6,8^9,10^11,13^14,17..19,22^23,24^25,27..30): mod_base = OTHER; note = Phosphorothioate linkage
  modified_base 25^26: mod_base = OTHER; note = Methylphosphonate linkage
  misc_feature 1..31: note = RM109899
ccgtgaggggcatgatgccatacnntgccac

SEQ ID NO: 1126 - DNA, 30 bp, synthetic construct
  source 1..30: mol_type = other DNA
  misc_feature 23..24: note = DNA
  misc_feature order(1..22,25..30): note = RNA
  modified_base order(5..6,9,19): mod_base = OTHER; note = 2-Prime-O-Methoxyethyl modified nucleoside
  modified_base order(22,27): mod_base = OTHER; note = 2-Prime-O-Methoxyethyl modified 5-methyl Cytidine
  modified_base order(15,20): mod_base = OTHER; note = 2-Prime-O-Methoxyethyl modified 5-methyl Uridine
  modified_base 23: mod_base = OTHER; note = DNA nucleotide carrying a 6-amino-5-nitro-3-yl-2(1H)-pyridone nucleobase
  modified_base 24: mod_base = OTHER; note = DNA nucleotide carrying a hypoxanthine nucleobase
  modified_base order(3..4,7,12..13,17..18,21,26): mod_base = OTHER; note = 2-Prime-Fluoro modified nucleoside
  modified_base order(1..2,8,10..11,14,16,25,28..30): mod_base = OTHER; note = 2-Prime-O-Methyl modified nucleoside
  modified_base order(1^2,10^11,13^14,18^19,29^30): mod_base = OTHER; note = (1,3-dimethylimidazolidin-2-ylidene) Phosphoramidate linkage
  modified_base order(2..5,7^8,9^10,12^13,16..18,21^22,23^24,26..29): mod_base = OTHER; note = Phosphorothioate linkage
  modified_base 24^25: mod_base = OTHER; note = Methylphosphonate linkage
  misc_feature 1..30: note = RM109900
cgtgaggggcatgatgccatacnntgccac

SEQ ID NO: 1127 - DNA, 30 bp, synthetic construct; identical to SEQ ID NO: 29
  source 1..30: mol_type = other DNA
  misc_feature 24..25: note = DNA
  misc_feature order(1..23,26..30): note = RNA
  modified_base order(23,28): mod_base = OTHER; note = 2-Prime-O-Methoxyethyl modified 5-methyl Cytidine
  modified_base 24: mod_base = OTHER; note = DNA nucleotide carrying a 6-amino-5-nitro-3-yl-2(1H)-pyridone nucleobase
  modified_base 25: mod_base = OTHER; note = DNA nucleotide carrying a hypoxanthine nucleobase
  modified_base order(5..6,9..10,13..14,17..22,27): mod_base = OTHER; note = 2-Prime-Fluoro modified nucleoside
  modified_base order(1..4,7..8,11..12,15..16,26,29..30): mod_base = OTHER; note = 2-Prime-O-Methyl modified nucleoside
  modified_base order(1^2,29^30): mod_base = OTHER; note = (1,3-dimethylimidazolidin-2-ylidene) Phosphoramidate linkage
  modified_base order(2..23,24^25,27..29): mod_base = OTHER; note = Phosphorothioate linkage
  modified_base 25^26: mod_base = OTHER; note = Methylphosphonate linkage
  misc_feature 1..30: note = RM107331

SEQ ID NO: 1128 - DNA, 30 bp, synthetic construct; identical to SEQ ID NO: 29
  source 1..30: mol_type = other DNA
  misc_feature 23..25: note = DNA
  misc_feature order(1..22,26..30): note = RNA
  modified_base 28: mod_base = OTHER; note = 2-Prime-O-Methoxyethyl modified 5-methyl Cytidine
  modified_base 24: mod_base = OTHER; note = DNA nucleotide carrying a 6-amino-5-nitro-3-yl-2(1H)-pyridone nucleobase
  modified_base 25: mod_base = OTHER; note = DNA nucleotide carrying a hypoxanthine nucleobase
  modified_base order(5..6,9..10,13..14,17..22,27): mod_base = OTHER; note = 2-Prime-Fluoro modified nucleoside
  modified_base order(1..4,7..8,11..12,15..16,26,29..30): mod_base = OTHER; note = 2-Prime-O-Methyl modified nucleoside
  modified_base order(1^2,29^30): mod_base = OTHER; note = (1,3-dimethylimidazolidin-2-ylidene) Phosphoramidate linkage
  modified_base order(2..25,27..29): mod_base = OTHER; note = Phosphorothioate linkage
  modified_base 25^26: mod_base = OTHER; note = Methylphosphonate linkage
  misc_feature 1..30: note = RM107332

SEQ ID NO: 1129 - DNA, 30 bp, synthetic construct; identical to SEQ ID NO: 29
  source 1..30: mol_type = other DNA
  misc_feature 23..25: note = DNA
  misc_feature order(1..22,26..30): note = RNA
  modified_base 28: mod_base = OTHER; note = 2-Prime-O-Methoxyethyl modified 5-methyl Cytidine
  modified_base 24: mod_base = OTHER; note = DNA nucleotide carrying a 6-amino-5-nitro-3-yl-2(1H)-pyridone nucleobase
  modified_base 25: mod_base = OTHER; note = DNA nucleotide carrying a hypoxanthine nucleobase
  modified_base order(5..6,9..10,13..14,17..22,27): mod_base = OTHER; note = 2-Prime-Fluoro modified nucleoside
  modified_base order(1..4,7..8,11..12,15..16,26,29..30): mod_base = OTHER; note = 2-Prime-O-Methyl modified nucleoside
  modified_base order(1^2,29^30): mod_base = OTHER; note = (1,3-dimethylimidazolidin-2-ylidene) Phosphoramidate linkage
  modified_base order(2..25,27..29): mod_base = OTHER; note = Phosphorothioate linkage
  modified_base 25^26: mod_base = OTHER; note = Mesylphosphoramidate linkage
  misc_feature 1..30: note = RM107333

SEQ ID NO: 1130 - DNA, 30 bp, synthetic construct; identical to SEQ ID NO: 29
  source 1..30: mol_type = other DNA
  misc_feature 24..25: note = DNA
  misc_feature order(1..23,26..30): note = RNA
  modified_base order(23,28): mod_base = OTHER; note = 2-Prime-O-Methoxyethyl modified 5-methyl Cytidine
  modified_base 24: mod_base = OTHER; note = DNA nucleotide carrying a 6-amino-5-nitro-3-yl-2(1H)-pyridone nucleobase
  modified_base 25: mod_base = OTHER; note = DNA nucleotide carrying a hypoxanthine nucleobase
  modified_base order(5..6,9..10,13..14,17..22,27): mod_base = OTHER; note = 2-Prime-Fluoro modified nucleoside
  modified_base order(1..4,7..8,11..12,15..16,26,29..30): mod_base = OTHER; note = 2-Prime-O-Methyl modified nucleoside
  modified_base order(1^2,25^26,29^30): mod_base = OTHER; note = (1,3-dimethylimidazolidin-2-ylidene) Phosphoramidate linkage
  modified_base order(2..23,24^25,27..29): mod_base = OTHER; note = Phosphorothioate linkage
  misc_feature 1..30: note = RM107334

SEQ ID NO: 1131 - DNA, 30 bp, synthetic construct; identical to SEQ ID NO: 29
  source 1..30: mol_type = other DNA
  misc_feature 24..25: note = DNA
  misc_feature order(1..23,26..30): note = RNA
  modified_base order(23,28): mod_base = OTHER; note = 2-Prime-O-Methoxyethyl modified 5-methyl Cytidine
  modified_base 24: mod_base = OTHER; note = DNA nucleotide carrying a 6-amino-5-nitro-3-yl-2(1H)-pyridone nucleobase
  modified_base 25: mod_base = OTHER; note = DNA nucleotide carrying a hypoxanthine nucleobase
  modified_base order(5..6,9..10,13..14,17..22,27): mod_base = OTHER; note = 2-Prime-Fluoro modified nucleoside
  modified_base order(1..4,7..8,11..12,15..16,26,29..30): mod_base = OTHER; note = 2-Prime-O-Methyl modified nucleoside
  modified_base order(1^2,29^30): mod_base = OTHER; note = (1,3-dimethylimidazolidin-2-ylidene) Phosphoramidate linkage
  modified_base order(2..23,24^25,27..29): mod_base = OTHER; note = Phosphorothioate linkage
  modified_base 25^26: mod_base = OTHER; note = Mesylphosphoramidate linkage
  misc_feature 1..30: note = RM107335

SEQ ID NO: 1132 - DNA, 30 bp, synthetic construct; identical to SEQ ID NO: 29
  source 1..30: mol_type = other DNA
  misc_feature 24..25: note = DNA
  misc_feature order(1..23,26..30): note = RNA
  modified_base order(23,28): mod_base = OTHER; note = 2-Prime-O-Methoxyethyl modified 5-methyl Cytidine
  modified_base 24: mod_base = OTHER; note = DNA nucleotide carrying a 6-amino-5-nitro-3-yl-2(1H)-pyridone nucleobase
  modified_base 25: mod_base = OTHER; note = DNA nucleotide carrying a hypoxanthine nucleobase
  modified_base order(5..6,9..14,17,19,21..22,27): mod_base = OTHER; note = 2-Prime-Fluoro modified nucleoside
  modified_base order(1..4,7..8,15..16,18,20,26,29..30): mod_base = OTHER; note = 2-Prime-O-Methyl modified nucleoside
  modified_base order(1^2,29^30): mod_base = OTHER; note = (1,3-dimethylimidazolidin-2-ylidene) Phosphoramidate linkage
  modified_base order(2..23,24^25,27..29): mod_base = OTHER; note = Phosphorothioate linkage
  modified_base 25^26: mod_base = OTHER; note = Methylphosphonate linkage
  misc_feature 1..30: note = RM107336

SEQ ID NO: 1133 - DNA, 30 bp, synthetic construct; identical to SEQ ID NO: 29
  source 1..30: mol_type = other DNA
  misc_feature 23..25: note = DNA
  misc_feature order(1..22,26..30): note = RNA
  modified_base 28: mod_base = OTHER; note = 2-Prime-O-Methoxyethyl modified 5-methyl Cytidine
  modified_base 24: mod_base = OTHER; note = DNA nucleotide carrying a 6-amino-5-nitro-3-yl-2(1H)-pyridone nucleobase
  modified_base 25: mod_base = OTHER; note = DNA nucleotide carrying a hypoxanthine nucleobase
  modified_base order(5..6,9..14,17,19,21..22,27): mod_base = OTHER; note = 2-Prime-Fluoro modified nucleoside
  modified_base order(1..4,7..8,15..16,18,20,26,29..30): mod_base = OTHER; note = 2-Prime-O-Methyl modified nucleoside
  modified_base order(1^2,29^30): mod_base = OTHER; note = (1,3-dimethylimidazolidin-2-ylidene) Phosphoramidate linkage
  modified_base order(2..25,27..29): mod_base = OTHER; note = Phosphorothioate linkage
  modified_base 25^26: mod_base = OTHER; note = Methylphosphonate linkage
  misc_feature 1..30: note = RM107337

SEQ ID NO: 1134 - DNA, 30 bp, synthetic construct; identical to SEQ ID NO: 29
  source 1..30: mol_type = other DNA
  misc_feature 23..25: note = DNA
  misc_feature order(1..22,26..30): note = RNA
  modified_base 28: mod_base = OTHER; note = 2-Prime-O-Methoxyethyl modified 5-methyl Cytidine
  modified_base 24: mod_base = OTHER; note = DNA nucleotide carrying a 6-amino-5-nitro-3-yl-2(1H)-pyridone nucleobase
  modified_base 25: mod_base = OTHER; note = DNA nucleotide carrying a hypoxanthine nucleobase
  modified_base order(5..6,9..14,17,19,21..22,27): mod_base = OTHER; note = 2-Prime-Fluoro modified nucleoside
  modified_base order(1..4,7..8,15..16,18,20,26,29..30): mod_base = OTHER; note = 2-Prime-O-Methyl modified nucleoside
  modified_base order(1^2,29^30): mod_base = OTHER; note = (1,3-dimethylimidazolidin-2-ylidene) Phosphoramidate linkage
  modified_base order(2..25,27..29): mod_base = OTHER; note = Phosphorothioate linkage
  modified_base 25^26: mod_base = OTHER; note = Mesylphosphoramidate linkage
  misc_feature 1..30: note = RM107338

SEQ ID NO: 1135 - DNA, 30 bp, synthetic construct; identical to SEQ ID NO: 29
  source 1..30: mol_type = other DNA
  misc_feature 24..25: note = DNA
  misc_feature order(1..23,26..30): note = RNA
  modified_base order(23,28): mod_base = OTHER; note = 2-Prime-O-Methoxyethyl modified 5-methyl Cytidine
  modified_base 24: mod_base = OTHER; note = DNA nucleotide carrying a 6-amino-5-nitro-3-yl-2(1H)-pyridone nucleobase
  modified_base 25: mod_base = OTHER; note = DNA nucleotide carrying a hypoxanthine nucleobase
  modified_base order(5..6,9..14,17,19,21..22,27): mod_base = OTHER; note = 2-Prime-Fluoro modified nucleoside
  modified_base order(1..4,7..8,15..16,18,20,26,29..30): mod_base = OTHER; note = 2-Prime-O-Methyl modified nucleoside
  modified_base order(1^2,25^26,29^30): mod_base = OTHER; note = (1,3-dimethylimidazolidin-2-ylidene) Phosphoramidate linkage
  modified_base order(2..23,24^25,27..29): mod_base = OTHER; note = Phosphorothioate linkage
  misc_feature 1..30: note = RM107339

SEQ ID NO: 1136 - DNA, 30 bp, synthetic construct; identical to SEQ ID NO: 29
  source 1..30: mol_type = other DNA
  misc_feature 24..25: note = DNA
  misc_feature order(1..23,26..30): note = RNA
  modified_base order(23,28): mod_base = OTHER; note = 2-Prime-O-Methoxyethyl modified 5-methyl Cytidine
  modified_base 24: mod_base = OTHER; note = DNA nucleotide carrying a 6-amino-5-nitro-3-yl-2(1H)-pyridone nucleobase
  modified_base 25: mod_base = OTHER; note = DNA nucleotide carrying a hypoxanthine nucleobase
  modified_base order(5..6,9..14,17,19,21..22,27): mod_base = OTHER; note = 2-Prime-Fluoro modified nucleoside
  modified_base order(1..4,7..8,15..16,18,20,26,29..30): mod_base = OTHER; note = 2-Prime-O-Methyl modified nucleoside
  modified_base order(1^2,29^30): mod_base = OTHER; note = (1,3-dimethylimidazolidin-2-ylidene) Phosphoramidate linkage
  modified_base order(2..23,24^25,27..29): mod_base = OTHER; note = Phosphorothioate linkage
  modified_base 25^26: mod_base = OTHER; note = Mesylphosphoramidate linkage
  misc_feature 1..30: note = RM107340

SEQ ID NO: 1137 - DNA, 30 bp, synthetic construct; identical to SEQ ID NO: 29
  source 1..30: mol_type = other DNA
  misc_feature 24..25: note = DNA
  misc_feature order(1..23,26..30): note = RNA
  modified_base order(23,28): mod_base = OTHER; note = 2-Prime-O-Methoxyethyl modified 5-methyl Cytidine
  modified_base 24: mod_base = OTHER; note = DNA nucleotide carrying a 6-amino-5-nitro-3-yl-2(1H)-pyridone nucleobase
  modified_base 25: mod_base = OTHER; note = DNA nucleotide carrying a hypoxanthine nucleobase
  modified_base order(5..6,9..12,17,19,21..22,27): mod_base = OTHER; note = 2-Prime-Fluoro modified nucleoside
  modified_base order(1..4,7..8,13..16,18,20,26,29..30): mod_base = OTHER; note = 2-Prime-O-Methyl modified nucleoside
  modified_base order(1^2,29^30): mod_base = OTHER; note = (1,3-dimethylimidazolidin-2-ylidene) Phosphoramidate linkage
  modified_base order(2..23,24^25,27..29): mod_base = OTHER; note = Phosphorothioate linkage
  modified_base 25^26: mod_base = OTHER; note = Methylphosphonate linkage
  misc_feature 1..30: note = RM107341

SEQ ID NO: 1138 - DNA, 30 bp, synthetic construct; identical to SEQ ID NO: 29
  source 1..30: mol_type = other DNA
  misc_feature 23..25: note = DNA
  misc_feature order(1..22,26..30): note = RNA
  modified_base 28: mod_base = OTHER; note = 2-Prime-O-Methoxyethyl modified 5-methyl Cytidine
  modified_base 24: mod_base = OTHER; note = DNA nucleotide carrying a 6-amino-5-nitro-3-yl-2(1H)-pyridone nucleobase
  modified_base 25: mod_base = OTHER; note = DNA nucleotide carrying a hypoxanthine nucleobase
  modified_base order(5..6,9..12,17,19,21..22,27): mod_base = OTHER; note = 2-Prime-Fluoro modified nucleoside
  modified_base order(1..4,7..8,13..16,18,20,26,29..30): mod_base = OTHER; note = 2-Prime-O-Methyl modified nucleoside
  modified_base order(1^2,29^30): mod_base = OTHER; note = (1,3-dimethylimidazolidin-2-ylidene) Phosphoramidate linkage
  modified_base order(2..25,27..29): mod_base = OTHER; note = Phosphorothioate linkage
  modified_base 25^26: mod_base = OTHER; note = Methylphosphonate linkage
  misc_feature 1..30: note = RM107342

SEQ ID NO: 1139 - DNA, 30 bp, synthetic construct; identical to SEQ ID NO: 29
  source 1..30: mol_type = other DNA
  misc_feature 23..25: note = DNA
  misc_feature order(1..22,26..30): note = RNA
  modified_base 28: mod_base = OTHER; note = 2-Prime-O-Methoxyethyl modified 5-methyl Cytidine
  modified_base 24: mod_base = OTHER; note = DNA nucleotide carrying a 6-amino-5-nitro-3-yl-2(1H)-pyridone nucleobase
  modified_base 25: mod_base = OTHER; note = DNA nucleotide carrying a hypoxanthine nucleobase
  modified_base order(5..6,9..12,17,19,21..22,27): mod_base = OTHER; note = 2-Prime-Fluoro modified nucleoside
  modified_base order(1..4,7..8,13..16,18,20,26,29..30): mod_base = OTHER; note = 2-Prime-O-Methyl modified nucleoside
  modified_base order(1^2,29^30): mod_base = OTHER; note = (1,3-dimethylimidazolidin-2-ylidene) Phosphoramidate linkage
  modified_base order(2..25,27..29): mod_base = OTHER; note = Phosphorothioate linkage
  modified_base 25^26: mod_base = OTHER; note = Mesylphosphoramidate linkage
  misc_feature 1..30: note = RM107343

SEQ ID NO: 1140 - DNA, 30 bp, synthetic construct; identical to SEQ ID NO: 29
  source 1..30: mol_type = other DNA
  misc_feature 24..25: note = DNA
  misc_feature order(1..23,26..30): note = RNA
  modified_base order(23,28): mod_base = OTHER; note = 2-Prime-O-Methoxyethyl modified 5-methyl Cytidine
  modified_base 24: mod_base = OTHER; note = DNA nucleotide carrying a 6-amino-5-nitro-3-yl-2(1H)-pyridone nucleobase
  modified_base 25: mod_base = OTHER; note = DNA nucleotide carrying a hypoxanthine nucleobase
  modified_base order(5..6,9..12,17,19,21..22,27): mod_base = OTHER; note = 2-Prime-Fluoro modified nucleoside
  modified_base order(1..4,7..8,13..16,18,20,26,29..30): mod_base = OTHER; note = 2-Prime-O-Methyl modified nucleoside
  modified_base order(1^2,25^26,29^30): mod_base = OTHER; note = (1,3-dimethylimidazolidin-2-ylidene) Phosphoramidate linkage
  modified_base order(2..23,24^25,27..29): mod_base = OTHER; note = Phosphorothioate linkage
  misc_feature 1..30: note = RM107344

SEQ ID NO: 1141 - DNA, 30 bp, synthetic construct; identical to SEQ ID NO: 29
  source 1..30: mol_type = other DNA
  misc_feature 24..25: note = DNA
  misc_feature order(1..23,26..30): note = RNA
  modified_base order(23,28): mod_base = OTHER; note = 2-Prime-O-Methoxyethyl modified 5-methyl Cytidine
  modified_base 24: mod_base = OTHER; note = DNA nucleotide carrying a 6-amino-5-nitro-3-yl-2(1H)-pyridone nucleobase
  modified_base 25: mod_base = OTHER; note = DNA nucleotide carrying a hypoxanthine nucleobase
  modified_base order(5..6,9..12,17,19,21..22,27): mod_base = OTHER; note = 2-Prime-Fluoro modified nucleoside
  modified_base order(1..4,7..8,13..16,18,20,26,29..30): mod_base = OTHER; note = 2-Prime-O-Methyl modified nucleoside
  modified_base order(1^2,29^30): mod_base = OTHER; note = (1,3-dimethylimidazolidin-2-ylidene) Phosphoramidate linkage
  modified_base order(2..23,24^25,27..29): mod_base = OTHER; note = Phosphorothioate linkage
  modified_base 25^26: mod_base = OTHER; note = Mesylphosphoramidate linkage
  misc_feature 1..30: note = RM107345

SEQ ID NO: 1142 - DNA, 30 bp, synthetic construct; identical to SEQ ID NO: 29
  source 1..30: mol_type = other DNA
  misc_feature 24..25: note = DNA
  misc_feature order(1..23,26..30): note = RNA
  modified_base order(23,28): mod_base = OTHER; note = 2-Prime-O-Methoxyethyl modified 5-methyl Cytidine
  modified_base 24: mod_base = OTHER; note = DNA nucleotide carrying a 6-amino-5-nitro-3-yl-2(1H)-pyridone nucleobase
  modified_base 25: mod_base = OTHER; note = DNA nucleotide carrying a hypoxanthine nucleobase
  modified_base order(8..12,17,19,21..22,27): mod_base = OTHER; note = 2-Prime-Fluoro modified nucleoside
  modified_base order(1..7,13..16,18,20,26,29..30): mod_base = OTHER; note = 2-Prime-O-Methyl modified nucleoside
  modified_base order(1^2,29^30): mod_base = OTHER; note = (1,3-dimethylimidazolidin-2-ylidene) Phosphoramidate linkage
  modified_base order(2..23,24^25,27..29): mod_base = OTHER; note = Phosphorothioate linkage
  modified_base 25^26: mod_base = OTHER; note = Methylphosphonate linkage
  misc_feature 1..30: note = RM107346

SEQ ID NO: 1143 - DNA, 30 bp, synthetic construct; identical to SEQ ID NO: 29
  source 1..30: mol_type = other DNA
  misc_feature 23..25: note = DNA
  misc_feature order(1..22,26..30): note = RNA
  modified_base 28: mod_base = OTHER; note = 2-Prime-O-Methoxyethyl modified 5-methyl Cytidine
  modified_base 24: mod_base = OTHER; note = DNA nucleotide carrying a 6-amino-5-nitro-3-yl-2(1H)-pyridone nucleobase
  modified_base 25: mod_base = OTHER; note = DNA nucleotide carrying a hypoxanthine nucleobase
  modified_base order(8..12,17,19,21..22,27): mod_base = OTHER; note = 2-Prime-Fluoro modified nucleoside
  modified_base order(1..7,13..16,18,20,26,29..30): mod_base = OTHER; note = 2-Prime-O-Methyl modified nucleoside
  modified_base order(1^2,29^30): mod_base = OTHER; note = (1,3-dimethylimidazolidin-2-ylidene) Phosphoramidate linkage
  modified_base order(2..25,27..29): mod_base = OTHER; note = Phosphorothioate linkage
  modified_base 25^26: mod_base = OTHER; note = Methylphosphonate linkage
  misc_feature 1..30: note = RM107347

SEQ ID NO: 1144 - DNA, 30 bp, synthetic construct; identical to SEQ ID NO: 29
  source 1..30: mol_type = other DNA
  misc_feature 23..25: note = DNA
  misc_feature order(1..22,26..30): note = RNA
  modified_base 28: mod_base = OTHER; note = 2-Prime-O-Methoxyethyl modified 5-methyl Cytidine
  modified_base 24: mod_base = OTHER; note = DNA nucleotide carrying a 6-amino-5-nitro-3-yl-2(1H)-pyridone nucleobase
  modified_base 25: mod_base = OTHER; note = DNA nucleotide carrying a hypoxanthine nucleobase
  modified_base order(8..12,17,19,21..22,27): mod_base = OTHER; note = 2-Prime-Fluoro modified nucleoside
  modified_base order(1..7,13..16,18,20,26,29..30): mod_base = OTHER; note = 2-Prime-O-Methyl modified nucleoside
  modified_base order(1^2,29^30): mod_base = OTHER; note = (1,3-dimethylimidazolidin-2-ylidene) Phosphoramidate linkage
  modified_base order(2..25,27..29): mod_base = OTHER; note = Phosphorothioate linkage
  modified_base 25^26: mod_base = OTHER; note = Mesylphosphoramidate linkage
  misc_feature 1..30: note = RM107348

SEQ ID NO: 1145 - DNA, 30 bp, synthetic construct; identical to SEQ ID NO: 29
  source 1..30: mol_type = other DNA
  misc_feature 24..25: note = DNA
  misc_feature order(1..23,26..30): note = RNA
  modified_base order(23,28): mod_base = OTHER; note = 2-Prime-O-Methoxyethyl modified 5-methyl Cytidine
  modified_base 24: mod_base = OTHER; note = DNA nucleotide carrying a 6-amino-5-nitro-3-yl-2(1H)-pyridone nucleobase
  modified_base 25: mod_base = OTHER; note = DNA nucleotide carrying a hypoxanthine nucleobase
  modified_base order(8..12,17,19,21..22,27): mod_base = OTHER; note = 2-Prime-Fluoro modified nucleoside
  modified_base order(1..7,13..16,18,20,26,29..30): mod_base = OTHER; note = 2-Prime-O-Methyl modified nucleoside
  modified_base order(1^2,25^26,29^30): mod_base = OTHER; note = (1,3-dimethylimidazolidin-2-ylidene) Phosphoramidate linkage
  modified_base order(2..23,24^25,27..29): mod_base = OTHER; note = Phosphorothioate linkage
  misc_feature 1..30: note = RM107349

SEQ ID NO: 1146 - DNA, 30 bp, synthetic construct; identical to SEQ ID NO: 29
  source 1..30: mol_type = other DNA
  misc_feature 24..25: note = DNA
  misc_feature order(1..23,26..30): note = RNA
  modified_base order(23,28): mod_base = OTHER; note = 2-Prime-O-Methoxyethyl modified 5-methyl Cytidine
  modified_base 24: mod_base = OTHER; note = DNA nucleotide carrying a 6-amino-5-nitro-3-yl-2(1H)-pyridone nucleobase
  modified_base 25: mod_base = OTHER; note = DNA nucleotide carrying a hypoxanthine nucleobase
  modified_base order(8..12,17,19,21..22,27): mod_base = OTHER; note = 2-Prime-Fluoro modified nucleoside
  modified_base order(1..7,13..16,18,20,26,29..30): mod_base = OTHER; note = 2-Prime-O-Methyl modified nucleoside
  modified_base order(1^2,29^30): mod_base = OTHER; note = (1,3-dimethylimidazolidin-2-ylidene) Phosphoramidate linkage
  modified_base order(2..23,24^25,27..29): mod_base = OTHER; note = Phosphorothioate linkage
  modified_base 25^26: mod_base = OTHER; note = Mesylphosphoramidate linkage
  misc_feature 1..30: note = RM107350

SEQ ID NO: 1147 - DNA, 26 bp, synthetic construct
  source 1..26: mol_type = other DNA
  misc_feature 20..21: note = DNA
  misc_feature order(1..19,22..26): note = RNA
  modified_base order(19,24): mod_base = OTHER; note = 2-Prime-O-Methoxyethyl modified 5-methyl Cytidine
  modified_base 20: mod_base = OTHER; note = DNA nucleotide carrying a 6-amino-5-nitro-3-yl-2(1H)-pyridone nucleobase
  modified_base 21: mod_base = OTHER; note = DNA nucleotide carrying a hypoxanthine nucleobase
  modified_base order(1..2,5..6,9..10,13..18,23): mod_base = OTHER; note = 2-Prime-Fluoro modified nucleoside
  modified_base order(3..4,7..8,11..12,22,25..26): mod_base = OTHER; note = 2-Prime-O-Methyl modified nucleoside
  modified_base order(1^2,25^26): mod_base = OTHER; note = (1,3-dimethylimidazolidin-2-ylidene) Phosphoramidate linkage
  modified_base order(2..19,20^21,23..25): mod_base = OTHER; note = Phosphorothioate linkage
  modified_base 21^22: mod_base = OTHER; note = Methylphosphonate linkage
  misc_feature 1..26: note = RM107351
gaggggcatgatgccatacnntgcca

SEQ ID NO: 1148 - DNA, 26 bp, synthetic construct
  source 1..26: mol_type = other DNA
  misc_feature 20..21: note = DNA
  misc_feature order(1..19,22..26): note = RNA
  modified_base order(19,24): mod_base = OTHER; note = 2-Prime-O-Methoxyethyl modified 5-methyl Cytidine
  modified_base 20: mod_base = OTHER; note = DNA nucleotide carrying a 6-amino-5-nitro-3-yl-2(1H)-pyridone nucleobase
  modified_base 21: mod_base = OTHER; note = DNA nucleotide carrying a hypoxanthine nucleobase
  modified_base order(1..2,5..10,13,15,17..18,23): mod_base = OTHER; note = 2-Prime-Fluoro modified nucleoside
  modified_base order(3..4,11..12,14,16,22,25..26): mod_base = OTHER; note = 2-Prime-O-Methyl modified nucleoside
  modified_base order(1^2,25^26): mod_base = OTHER; note = (1,3-dimethylimidazolidin-2-ylidene) Phosphoramidate linkage
  modified_base order(2..19,20^21,23..25): mod_base = OTHER; note = Phosphorothioate linkage
  modified_base 21^22: mod_base = OTHER; note = Methylphosphonate linkage
  misc_feature 1..26: note = RM107352
gaggggcatgatgccatacnntgcca

SEQ ID NO: 1149 - DNA, 26 bp, synthetic construct
  source 1..26: mol_type = other DNA
  misc_feature 20..21: note = DNA
  misc_feature order(1..19,22..26): note = RNA
  modified_base order(19,24): mod_base = OTHER; note = 2-Prime-O-Methoxyethyl modified 5-methyl Cytidine
  modified_base 20: mod_base = OTHER; note = DNA nucleotide carrying a 6-amino-5-nitro-3-yl-2(1H)-pyridone nucleobase
  modified_base 21: mod_base = OTHER; note = DNA nucleotide carrying a hypoxanthine nucleobase
  modified_base order(1..2,5..8,13,15,17..18,23): mod_base = OTHER; note = 2-Prime-Fluoro modified nucleoside
  modified_base order(3..4,9..12,14,16,22,25..26): mod_base = OTHER; note = 2-Prime-O-Methyl modified nucleoside
  modified_base order(1^2,25^26): mod_base = OTHER; note = (1,3-dimethylimidazolidin-2-ylidene) Phosphoramidate linkage
  modified_base order(2..19,20^21,23..25): mod_base = OTHER; note = Phosphorothioate linkage
  modified_base 21^22: mod_base = OTHER; note = Methylphosphonate linkage
  misc_feature 1..26: note = RM107353
gaggggcatgatgccatacnntgcca

SEQ ID NO: 1150 - DNA, 26 bp, synthetic construct
  source 1..26: mol_type = other DNA
  misc_feature 20..21: note = DNA
  misc_feature order(1..19,22..26): note = RNA
  modified_base order(19,24): mod_base = OTHER; note = 2-Prime-O-Methoxyethyl modified 5-methyl Cytidine
  modified_base 20: mod_base = OTHER; note = DNA nucleotide carrying a 6-amino-5-nitro-3-yl-2(1H)-pyridone nucleobase
  modified_base 21: mod_base = OTHER; note = DNA nucleotide carrying a hypoxanthine nucleobase
  modified_base order(4..8,13,15,17..18,23): mod_base = OTHER; note = 2-Prime-Fluoro modified nucleoside
  modified_base order(1..3,9..12,14,16,22,25..26): mod_base = OTHER; note = 2-Prime-O-Methyl modified nucleoside
  modified_base order(1^2,25^26): mod_base = OTHER; note = (1,3-dimethylimidazolidin-2-ylidene) Phosphoramidate linkage
  modified_base order(2..19,20^21,23..25): mod_base = OTHER; note = Phosphorothioate linkage
  modified_base 21^22: mod_base = OTHER; note = Methylphosphonate linkage
  misc_feature 1..26: note = RM107354
gaggggcatgatgccatacnntgcca

SEQ ID NO: 1151 - DNA, 27 bp, synthetic construct
  source 1..27: mol_type = other DNA
  misc_feature 14..15: note = DNA
  misc_feature order(1..13,16..27): note = RNA
  modified_base 2: mod_base = OTHER; note = 2-Prime-O-Methoxyethyl modified nucleoside
  modified_base order(1,13,18): mod_base = OTHER; note = 2-Prime-O-Methoxyethyl modified 5-methyl Cytidine
  modified_base 3: mod_base = OTHER; note = 2-Prime-O-Methoxyethyl modified 5-methyl Uridine
  modified_base 14: mod_base = OTHER; note = DNA nucleotide carrying a 6-amino-5-nitro-3-yl-2(1H)-pyridone nucleobase
  modified_base 15: mod_base = OTHER; note = DNA nucleotide carrying a hypoxanthine nucleobase
  modified_base order(8,10,12,17,19,21,23): mod_base = OTHER; note = 2-Prime-Fluoro modified nucleoside
  modified_base order(4..7,9,11,16,20,22,24..27): mod_base = OTHER; note = 2-Prime-O-Methyl modified nucleoside
  modified_base order(4..13,14^15,17..27): mod_base = OTHER; note = Phosphorothioate linkage
  modified_base 15^16: mod_base = OTHER; note = Methylphosphonate linkage
  misc_feature 1..27: note = RM107355
catgatgccatacnntgccaccagggc

SEQ ID NO: 1152 - DNA, 27 bp, synthetic construct
  source 1..27: mol_type = other DNA
  misc_feature 14..15: note = DNA
  misc_feature order(1..13,16..27): note = RNA
  modified_base 2: mod_base = OTHER; note = 2-Prime-O-Methoxyethyl modified nucleoside
  modified_base order(1,13,18): mod_base = OTHER; note = 2-Prime-O-Methoxyethyl modified 5-methyl Cytidine
  modified_base 3: mod_base = OTHER; note = 2-Prime-O-Methoxyethyl modified 5-methyl Uridine
  modified_base 14: mod_base = OTHER; note = DNA nucleotide carrying a 6-amino-5-nitro-3-yl-2(1H)-pyridone nucleobase
  modified_base 15: mod_base = OTHER; note = DNA nucleotide carrying a hypoxanthine nucleobase
  modified_base order(8,10,12,17,19,21,23): mod_base = OTHER; note = 2-Prime-Fluoro modified nucleoside
  modified_base order(4..7,9,11,16,20,22,24..27): mod_base = OTHER; note = 2-Prime-O-Methyl modified nucleoside
  modified_base order(1^2,26^27): mod_base = OTHER; note = (1,3-dimethylimidazolidin-2-ylidene) Phosphoramidate linkage
  modified_base order(4..13,14^15,17..26): mod_base = OTHER; note = Phosphorothioate linkage
  modified_base 15^16: mod_base = OTHER; note = Methylphosphonate linkage
  misc_feature 1..27: note = RM107356
catgatgccatacnntgccaccagggc

SEQ ID NO: 1153 - DNA, 27 bp, synthetic construct
  source 1..27: mol_type = other DNA
  misc_feature 13..15: note = DNA
  misc_feature order(1..12,16..27): note = RNA
  modified_base 2: mod_base = OTHER; note = 2-Prime-O-Methoxyethyl modified nucleoside
  modified_base order(1,18): mod_base = OTHER; note = 2-Prime-O-Methoxyethyl modified 5-methyl Cytidine
  modified_base 3: mod_base = OTHER; note = 2-Prime-O-Methoxyethyl modified 5-methyl Uridine
  modified_base 14: mod_base = OTHER; note = DNA nucleotide carrying a 6-amino-5-nitro-3-yl-2(1H)-pyridone nucleobase
  modified_base 15: mod_base = OTHER; note = DNA nucleotide carrying a hypoxanthine nucleobase
  modified_base order(8,10,12,17,19,21,23): mod_base = OTHER; note = 2-Prime-Fluoro modified nucleoside
  modified_base order(4..7,9,11,16,20,22,24..27): mod_base = OTHER; note = 2-Prime-O-Methyl modified nucleoside
  modified_base order(1^2,26^27): mod_base = OTHER; note = (1,3-dimethylimidazolidin-2-ylidene) Phosphoramidate linkage
  modified_base order(4..15,17..26): mod_base = OTHER; note = Phosphorothioate linkage
  modified_base 15^16: mod_base = OTHER; note = Methylphosphonate linkage
  misc_feature 1..27: note = RM107357
catgatgccatacnntgccaccagggc

SEQ ID NO: 1154 - DNA, 27 bp, synthetic construct
  source 1..27: mol_type = other DNA
  misc_feature 13..15: note = DNA
  misc_feature order(1..12,16..27): note = RNA
  modified_base 2: mod_base = OTHER; note = 2-Prime-O-Methoxyethyl modified nucleoside
  modified_base order(1,18): mod_base = OTHER; note = 2-Prime-O-Methoxyethyl modified 5-methyl Cytidine
  modified_base 3: mod_base = OTHER; note = 2-Prime-O-Methoxyethyl modified 5-methyl Uridine
  modified_base 14: mod_base = OTHER; note = DNA nucleotide carrying a 6-amino-5-nitro-3-yl-2(1H)-pyridone nucleobase
  modified_base 15: mod_base = OTHER; note = DNA nucleotide carrying a hypoxanthine nucleobase
  modified_base order(8,10,12,17,19,21,23): mod_base = OTHER; note = 2-Prime-Fluoro modified nucleoside
  modified_base order(4..7,9,11,16,20,22,24..27): mod_base = OTHER; note = 2-Prime-O-Methyl modified nucleoside
  modified_base order(1^2,26^27): mod_base = OTHER; note = (1,3-dimethylimidazolidin-2-ylidene) Phosphoramidate linkage
  modified_base order(4..15,17..26): mod_base = OTHER; note = Phosphorothioate linkage
  modified_base 15^16: mod_base = OTHER; note = Mesylphosphoramidate linkage
  misc_feature 1..27: note = RM107358
catgatgccatacnntgccaccagggc

SEQ ID NO: 1155 - DNA, 27 bp, synthetic construct
  source 1..27: mol_type = other DNA
  misc_feature 14..15: note = DNA
  misc_feature order(1..13,16..27): note = RNA
  modified_base 2: mod_base = OTHER; note = 2-Prime-O-Methoxyethyl modified nucleoside
  modified_base order(1,13,18): mod_base = OTHER; note = 2-Prime-O-Methoxyethyl modified 5-methyl Cytidine
  modified_base 3: mod_base = OTHER; note = 2-Prime-O-Methoxyethyl modified 5-methyl Uridine
  modified_base 14: mod_base = OTHER; note = DNA nucleotide carrying a 6-amino-5-nitro-3-yl-2(1H)-pyridone nucleobase
  modified_base 15: mod_base = OTHER; note = DNA nucleotide carrying a hypoxanthine nucleobase
  modified_base order(8,10,12,17,19,21,23): mod_base = OTHER; note = 2-Prime-Fluoro modified nucleoside
  modified_base order(4..7,9,11,16,20,22,24..27): mod_base = OTHER; note = 2-Prime-O-Methyl modified nucleoside
  modified_base order(1^2,15^16,26^27): mod_base = OTHER; note = (1,3-dimethylimidazolidin-2-ylidene) Phosphoramidate linkage
  modified_base order(4..13,14^15,17..26): mod_base = OTHER; note = Phosphorothioate linkage
  misc_feature 1..27: note = RM107359
catgatgccatacnntgccaccagggc

SEQ ID NO: 1156 - DNA, 27 bp, synthetic construct
  source 1..27: mol_type = other DNA
  misc_feature 14..15: note = DNA
  misc_feature order(1..13,16..27): note = RNA
  modified_base 2: mod_base = OTHER; note = 2-Prime-O-Methoxyethyl modified nucleoside
  modified_base order(1,13,18): mod_base = OTHER; note = 2-Prime-O-Methoxyethyl modified 5-methyl Cytidine
  modified_base 3: mod_base = OTHER; note = 2-Prime-O-Methoxyethyl modified 5-methyl Uridine
  modified_base 14: mod_base = OTHER; note = DNA nucleotide carrying a 6-amino-5-nitro-3-yl-2(1H)-pyridone nucleobase
  modified_base 15: mod_base = OTHER; note = DNA nucleotide carrying a hypoxanthine nucleobase
  modified_base order(8,10,12,17,19,21,23): mod_base = OTHER; note = 2-Prime-Fluoro modified nucleoside
  modified_base order(4..7,9,11,16,20,22,24..27): mod_base = OTHER; note = 2-Prime-O-Methyl modified nucleoside
  modified_base order(1^2,26^27): mod_base = OTHER; note = (1,3-dimethylimidazolidin-2-ylidene) Phosphoramidate linkage
  modified_base order(4..13,14^15,17..26): mod_base = OTHER; note = Phosphorothioate linkage
  modified_base 15^16: mod_base = OTHER; note = Mesylphosphoramidate linkage
  misc_feature 1..27: note = RM107360
catgatgccatacnntgccaccagggc

SEQ ID NO: 1157 - DNA, 27 bp, synthetic construct
  source 1..27: mol_type = other DNA
  misc_feature 14..15: note = DNA
  misc_feature order(1..13,16..27): note = RNA
  modified_base 2: mod_base = OTHER; note = 2-Prime-O-Methoxyethyl modified nucleoside
  modified_base order(1,13,18): mod_base = OTHER; note = 2-Prime-O-Methoxyethyl modified 5-methyl Cytidine
  modified_base 3: mod_base = OTHER; note = 2-Prime-O-Methoxyethyl modified 5-methyl Uridine
  modified_base 14: mod_base = OTHER; note = DNA nucleotide carrying a 6-amino-5-nitro-3-yl-2(1H)-pyridone nucleobase
  modified_base 15: mod_base = OTHER; note = DNA nucleotide carrying a hypoxanthine nucleobase
  modified_base order(7,9,11,17,20,22,24): mod_base = OTHER; note = 2-Prime-Fluoro modified nucleoside
  modified_base order(4..6,8,10,12,16,19,21,23,25..27): mod_base = OTHER; note = 2-Prime-O-Methyl modified nucleoside
  modified_base order(1^2,26^27): mod_base = OTHER; note = (1,3-dimethylimidazolidin-2-ylidene) Phosphoramidate linkage
  modified_base order(4..13,14^15,17..26): mod_base = OTHER; note = Phosphorothioate linkage
  modified_base 15^16: mod_base = OTHER; note = Methylphosphonate linkage
  misc_feature 1..27: note = RM107361
catgatgccatacnntgccaccagggc

SEQ ID NO: 1158 - DNA, 27 bp, synthetic construct
  source 1..27: mol_type = other DNA
  misc_feature 13..15: note = DNA
  misc_feature order(1..12,16..27): note = RNA
  modified_base 2: mod_base = OTHER; note = 2-Prime-O-Methoxyethyl modified nucleoside
  modified_base order(1,18): mod_base = OTHER; note = 2-Prime-O-Methoxyethyl modified 5-methyl Cytidine
  modified_base 3: mod_base = OTHER; note = 2-Prime-O-Methoxyethyl modified 5-methyl Uridine
  modified_base 14: mod_base = OTHER; note = DNA nucleotide carrying a 6-amino-5-nitro-3-yl-2(1H)-pyridone nucleobase
  modified_base 15: mod_base = OTHER; note = DNA nucleotide carrying a hypoxanthine nucleobase
  modified_base order(7,9,11,17,20,22,24): mod_base = OTHER; note = 2-Prime-Fluoro modified nucleoside
  modified_base order(4..6,8,10,12,16,19,21,23,25..27): mod_base = OTHER; note = 2-Prime-O-Methyl modified nucleoside
  modified_base order(1^2,26^27): mod_base = OTHER; note = (1,3-dimethylimidazolidin-2-ylidene) Phosphoramidate linkage
  modified_base order(4..15,17..26): mod_base = OTHER; note = Phosphorothioate linkage
  modified_base 15^16: mod_base = OTHER; note = Methylphosphonate linkage
  misc_feature 1..27: note = RM107362
catgatgccatacnntgccaccagggc

SEQ ID NO: 1159 - DNA, 27 bp, synthetic construct
  source 1..27: mol_type = other DNA
  misc_feature 13..15: note = DNA
  misc_feature order(1..12,16..27): note = RNA
  modified_base 2: mod_base = OTHER; note = 2-Prime-O-Methoxyethyl modified nucleoside
  modified_base order(1,18): mod_base = OTHER; note = 2-Prime-O-Methoxyethyl modified 5-methyl Cytidine
  modified_base 3: mod_base = OTHER; note = 2-Prime-O-Methoxyethyl modified 5-methyl Uridine
  modified_base 14: mod_base = OTHER; note = DNA nucleotide carrying a 6-amino-5-nitro-3-yl-2(1H)-pyridone nucleobase
  modified_base 15: mod_base = OTHER; note = DNA nucleotide carrying a hypoxanthine nucleobase
  modified_base order(7,9,11,17,20,22,24): mod_base = OTHER; note = 2-Prime-Fluoro modified nucleoside
  modified_base order(4..6,8,10,12,16,19,21,23,25..27): mod_base = OTHER; note = 2-Prime-O-Methyl modified nucleoside
  modified_base order(1^2,26^27): mod_base = OTHER; note = (1,3-dimethylimidazolidin-2-ylidene) Phosphoramidate linkage
  modified_base order(4..15,17..26): mod_base = OTHER; note = Phosphorothioate linkage
  modified_base 15^16: mod_base = OTHER; note = Mesylphosphoramidate linkage
  misc_feature 1..27: note = RM107363
catgatgccatacnntgccaccagggc

SEQ ID NO: 1160 - DNA, 27 bp, synthetic construct
  source 1..27: mol_type = other DNA
  misc_feature 14..15: note = DNA
  misc_feature order(1..13,16..27): note = RNA
  modified_base 2: mod_base = OTHER; note = 2-Prime-O-Methoxyethyl modified nucleoside
  modified_base order(1,13,18): mod_base = OTHER; note = 2-Prime-O-Methoxyethyl modified 5-methyl Cytidine
  modified_base 3: mod_base = OTHER; note = 2-Prime-O-Methoxyethyl modified 5-methyl Uridine
  modified_base 14: mod_base = OTHER; note = DNA nucleotide carrying a 6-amino-5-nitro-3-yl-2(1H)-pyridone nucleobase
  modified_base 15: mod_base = OTHER; note = DNA nucleotide carrying a hypoxanthine nucleobase
  modified_base order(7,9,11,17,20,22,24): mod_base = OTHER; note = 2-Prime-Fluoro modified nucleoside
  modified_base order(4..6,8,10,12,16,19,21,23,25..27): mod_base = OTHER; note = 2-Prime-O-Methyl modified nucleoside
  modified_base order(1^2,15^16,26^27): mod_base = OTHER; note = (1,3-dimethylimidazolidin-2-ylidene) Phosphoramidate linkage
  modified_base order(4..13,14^15,17..26): mod_base = OTHER; note = Phosphorothioate linkage
  misc_feature 1..27: note = RM107364
catgatgccatacnntgccaccagggc

SEQ ID NO: 1161 - DNA, 27 bp, synthetic construct
  source 1..27: mol_type = other DNA
  misc_feature 14..15: note = DNA
  misc_feature order(1..13,16..27): note = RNA
  modified_base 2: mod_base = OTHER; note = 2-Prime-O-Methoxyethyl modified nucleoside
  modified_base order(1,13,18): mod_base = OTHER; note = 2-Prime-O-Methoxyethyl modified 5-methyl Cytidine
  modified_base 3: mod_base = OTHER; note = 2-Prime-O-Methoxyethyl modified 5-methyl Uridine
  modified_base 14: mod_base = OTHER; note = DNA nucleotide carrying a 6-amino-5-nitro-3-yl-2(1H)-pyridone nucleobase
  modified_base 15: mod_base = OTHER; note = DNA nucleotide carrying a hypoxanthine nucleobase
  modified_base order(7,9,11,17,20,22,24): mod_base = OTHER; note = 2-Prime-Fluoro modified nucleoside
  modified_base order(4..6,8,10,12,16,19,21,23,25..27): mod_base = OTHER; note = 2-Prime-O-Methyl modified nucleoside
  modified_base order(1^2,26^27): mod_base = OTHER; note = (1,3-dimethylimidazolidin-2-ylidene) Phosphoramidate linkage
  modified_base order(4..13,14^15,17..26): mod_base = OTHER; note = Phosphorothioate linkage
  modified_base 15^16: mod_base = OTHER; note = Mesylphosphoramidate linkage
  misc_feature 1..27: note = RM107365
catgatgccatacnntgccaccagggc

SEQ ID NO: 1162 - DNA, 27 bp, synthetic construct
  source 1..27: mol_type = other DNA
  misc_feature 14..15: note = DNA
  misc_feature order(1..13,16..27): note = RNA
  modified_base order(13,18): mod_base = OTHER; note = 2-Prime-O-Methoxyethyl modified 5-methyl Cytidine
  modified_base 14: mod_base = OTHER; note = DNA nucleotide carrying a 6-amino-5-nitro-3-yl-2(1H)-pyridone nucleobase
  modified_base 15: mod_base = OTHER; note = DNA nucleotide carrying a hypoxanthine nucleobase
  modified_base order(1..5,7,9,11,17): mod_base = OTHER; note = 2-Prime-Fluoro modified nucleoside
  modified_base order(6,8,10,12,16,19..27): mod_base = OTHER; note = 2-Prime-O-Methyl modified nucleoside
  modified_base order(1^2,26^27): mod_base = OTHER; note = (1,3-dimethylimidazolidin-2-ylidene) Phosphoramidate linkage
  modified_base order(4..13,14^15,17..26): mod_base = OTHER; note = Phosphorothioate linkage
  modified_base 15^16: mod_base = OTHER; note = Methylphosphonate linkage
  misc_feature 1..27: note = RM107366
catgatgccatacnntgccaccagggc

SEQ ID NO: 1163 - DNA, 27 bp, synthetic construct
  source 1..27: mol_type = other DNA
  misc_feature 13..15: note = DNA
  misc_feature order(1..12,16..27): note = RNA
  modified_base 18: mod_base = OTHER; note = 2-Prime-O-Methoxyethyl modified 5-methyl Cytidine
  modified_base 14: mod_base = OTHER; note = DNA nucleotide carrying a 6-amino-5-nitro-3-yl-2(1H)-pyridone nucleobase
  modified_base 15: mod_base = OTHER; note = DNA nucleotide carrying a hypoxanthine nucleobase
  modified_base order(1..5,7,9,11,17): mod_base = OTHER; note = 2-Prime-Fluoro modified nucleoside
  modified_base order(6,8,10,12,16,19..27): mod_base = OTHER; note = 2-Prime-O-Methyl modified nucleoside
  modified_base order(1^2,26^27): mod_base = OTHER; note = (1,3-dimethylimidazolidin-2-ylidene) Phosphoramidate linkage
  modified_base order(4..15,17..26): mod_base = OTHER; note = Phosphorothioate linkage
  modified_base 15^16: mod_base = OTHER; note = Methylphosphonate linkage
  misc_feature 1..27: note = RM107367
catgatgccatacnntgccaccagggc

SEQ ID NO: 1164 - DNA, 27 bp, synthetic construct
  source 1..27: mol_type = other DNA
  misc_feature 13..15: note = DNA
  misc_feature order(1..12,16..27): note = RNA
  modified_base 18: mod_base = OTHER; note = 2-Prime-O-Methoxyethyl modified 5-methyl Cytidine
  modified_base 14: mod_base = OTHER; note = DNA nucleotide carrying a 6-amino-5-nitro-3-yl-2(1H)-pyridone nucleobase
  modified_base 15: mod_base = OTHER; note = DNA nucleotide carrying a hypoxanthine nucleobase
  modified_base order(1..5,7,9,11,17): mod_base = OTHER; note = 2-Prime-Fluoro modified nucleoside
  modified_base order(6,8,10,12,16,19..27): mod_base = OTHER; note = 2-Prime-O-Methyl modified nucleoside
  modified_base order(1^2,26^27): mod_base = OTHER; note = (1,3-dimethylimidazolidin-2-ylidene) Phosphoramidate linkage
  modified_base order(4..15,17..26): mod_base = OTHER; note = Phosphorothioate linkage
  modified_base 15^16: mod_base = OTHER; note = Mesylphosphoramidate linkage
  misc_feature 1..27: note = RM107368
catgatgccatacnntgccaccagggc

SEQ ID NO: 1165 - DNA, 27 bp, synthetic construct
  source 1..27: mol_type = other DNA
  misc_feature 14..15: note = DNA
  misc_feature order(1..13,16..27): note = RNA
  modified_base order(13,18): mod_base = OTHER; note = 2-Prime-O-Methoxyethyl modified 5-methyl Cytidine
  modified_base 14: mod_base = OTHER; note = DNA nucleotide carrying a 6-amino-5-nitro-3-yl-2(1H)-pyridone nucleobase
  modified_base 15: mod_base = OTHER; note = DNA nucleotide carrying a hypoxanthine nucleobase
  modified_base order(1..5,7,9,11,17): mod_base = OTHER; note = 2-Prime-Fluoro modified nucleoside
  modified_base order(6,8,10,12,16,19..27): mod_base = OTHER; note = 2-Prime-O-Methyl modified nucleoside
  modified_base order(1^2,15^16,26^27): mod_base = OTHER; note = (1,3-dimethylimidazolidin-2-ylidene) Phosphoramidate linkage
  modified_base order(4..13,14^15,17..26): mod_base = OTHER; note = Phosphorothioate linkage
  misc_feature 1..27: note = RM107369
catgatgccatacnntgccaccagggc

SEQ ID NO: 1166 - DNA, 27 bp, synthetic construct
  source 1..27: mol_type = other DNA
  misc_feature 14..15: note = DNA
  misc_feature order(1..13,16..27): note = RNA
  modified_base order(13,18): mod_base = OTHER; note = 2-Prime-O-Methoxyethyl modified 5-methyl Cytidine
  modified_base 14: mod_base = OTHER; note = DNA nucleotide carrying a 6-amino-5-nitro-3-yl-2(1H)-pyridone nucleobase
  modified_base 15: mod_base = OTHER; note = DNA nucleotide carrying a hypoxanthine nucleobase
  modified_base order(1..5,7,9,11,17): mod_base = OTHER; note = 2-Prime-Fluoro modified nucleoside
  modified_base order(6,8,10,12,16,19..27): mod_base = OTHER; note = 2-Prime-O-Methyl modified nucleoside
  modified_base order(1^2,26^27): mod_base = OTHER; note = (1,3-dimethylimidazolidin-2-ylidene) Phosphoramidate linkage
  modified_base order(4..13,14^15,17..26): mod_base = OTHER; note = Phosphorothioate linkage
  modified_base 15^16: mod_base = OTHER; note = Mesylphosphoramidate linkage
  misc_feature 1..27: note = RM107370
catgatgccatacnntgccaccagggc

SEQ ID NO: 1167 - DNA, 27 bp, synthetic construct
  source 1..27: mol_type = other DNA
  misc_feature 14..15: note = DNA
  misc_feature order(1..13,16..27): note = RNA
  modified_base 2: mod_base = OTHER; note = 2-Prime-O-Methoxyethyl modified nucleoside
  modified_base order(1,13,18): mod_base = OTHER; note = 2-Prime-O-Methoxyethyl modified 5-methyl Cytidine
  modified_base 3: mod_base = OTHER; note = 2-Prime-O-Methoxyethyl modified 5-methyl Uridine
  modified_base 14: mod_base = OTHER; note = DNA nucleotide carrying a 6-amino-5-nitro-3-yl-2(1H)-pyridone nucleobase
  modified_base 15: mod_base = OTHER; note = DNA nucleotide carrying a hypoxanthine nucleobase
  modified_base order(17,20,22..26): mod_base = OTHER; note = 2-Prime-Fluoro modified nucleoside
  modified_base order(4..12,16,19,21,27): mod_base = OTHER; note = 2-Prime-O-Methyl modified nucleoside
  modified_base order(1^2,26^27): mod_base = OTHER; note = (1,3-dimethylimidazolidin-2-ylidene) Phosphoramidate linkage
  modified_base order(4..13,14^15,17..26): mod_base = OTHER; note = Phosphorothioate linkage
  modified_base 15^16: mod_base = OTHER; note = Methylphosphonate linkage
  misc_feature 1..27: note = RM107371
catgatgccatacnntgccaccagggc

SEQ ID NO: 1168 - DNA, 27 bp, synthetic construct
  source 1..27: mol_type = other DNA
  misc_feature 13..15: note = DNA
  misc_feature order(1..12,16..27): note = RNA
  modified_base 2: mod_base = OTHER; note = 2-Prime-O-Methoxyethyl modified nucleoside
  modified_base order(1,18): mod_base = OTHER; note = 2-Prime-O-Methoxyethyl modified 5-methyl Cytidine
  modified_base 3: mod_base = OTHER; note = 2-Prime-O-Methoxyethyl modified 5-methyl Uridine
  modified_base 14: mod_base = OTHER; note = DNA nucleotide carrying a 6-amino-5-nitro-3-yl-2(1H)-pyridone nucleobase
  modified_base 15: mod_base = OTHER; note = DNA nucleotide carrying a hypoxanthine nucleobase
  modified_base order(17,20,22..26): mod_base = OTHER; note = 2-Prime-Fluoro modified nucleoside
  modified_base order(4..12,16,19,21,27): mod_base = OTHER; note = 2-Prime-O-Methyl modified nucleoside
  modified_base order(1^2,26^27): mod_base = OTHER; note = (1,3-dimethylimidazolidin-2-ylidene) Phosphoramidate linkage
  modified_base order(4..15,17..26): mod_base = OTHER; note = Phosphorothioate linkage
  modified_base 15^16: mod_base = OTHER; note = Methylphosphonate linkage
  misc_feature 1..27: note = RM107372
catgatgccatacnntgccaccagggc

SEQ ID NO: 1169 - DNA, 27 bp, synthetic construct
  source 1..27: mol_type = other DNA
  misc_feature 13..15: note = DNA
  misc_feature order(1..12,16..27): note = RNA
  modified_base 2: mod_base = OTHER; note = 2-Prime-O-Methoxyethyl modified nucleoside
  modified_base order(1,18): mod_base = OTHER; note = 2-Prime-O-Methoxyethyl modified 5-methyl Cytidine
  modified_base 3: mod_base = OTHER; note = 2-Prime-O-Methoxyethyl modified 5-methyl Uridine
  modified_base 14: mod_base = OTHER; note = DNA nucleotide carrying a 6-amino-5-nitro-3-yl-2(1H)-pyridone nucleobase
  modified_base 15: mod_base = OTHER; note = DNA nucleotide carrying a hypoxanthine nucleobase
  modified_base order(17,20,22..26): mod_base = OTHER; note = 2-Prime-Fluoro modified nucleoside
  modified_base order(4..12,16,19,21,27): mod_base = OTHER; note = 2-Prime-O-Methyl modified nucleoside
  modified_base order(1^2,26^27): mod_base = OTHER; note = (1,3-dimethylimidazolidin-2-ylidene) Phosphoramidate linkage
  modified_base order(4..15,17..26): mod_base = OTHER; note = Phosphorothioate linkage
  modified_base 15^16: mod_base = OTHER; note = Mesylphosphoramidate linkage
  misc_feature 1..27: note = RM107373
catgatgccatacnntgccaccagggc

SEQ ID NO: 1170 - DNA, 27 bp, synthetic construct
  source 1..27: mol_type = other DNA
  misc_feature 14..15: note = DNA
  misc_feature order(1..13,16..27): note = RNA
  modified_base 2: mod_base = OTHER; note = 2-Prime-O-Methoxyethyl modified nucleoside
  modified_base order(1,13,18): mod_base = OTHER; note = 2-Prime-O-Methoxyethyl modified 5-methyl Cytidine
  modified_base 3: mod_base = OTHER; note = 2-Prime-O-Methoxyethyl modified 5-methyl Uridine
  modified_base 14: mod_base = OTHER; note = DNA nucleotide carrying a 6-amino-5-nitro-3-yl-2(1H)-pyridone nucleobase
  modified_base 15: mod_base = OTHER; note = DNA nucleotide carrying a hypoxanthine nucleobase
  modified_base order(17,20,22..26): mod_base = OTHER; note = 2-Prime-Fluoro modified nucleoside
  modified_base order(4..12,16,19,21,27): mod_base = OTHER; note = 2-Prime-O-Methyl modified nucleoside
  modified_base order(1^2,15^16,26^27): mod_base = OTHER; note = (1,3-dimethylimidazolidin-2-ylidene) Phosphoramidate linkage
  modified_base order(4..13,14^15,17..26): mod_base = OTHER; note = Phosphorothioate linkage
  misc_feature 1..27: note = RM107374
catgatgccatacnntgccaccagggc

SEQ ID NO: 1171 - DNA, 27 bp, synthetic construct
  source 1..27: mol_type = other DNA
  misc_feature 14..15: note = DNA
  misc_feature order(1..13,16..27): note = RNA
  modified_base 2: mod_base = OTHER; note = 2-Prime-O-Methoxyethyl modified nucleoside
  modified_base order(1,13,18): mod_base = OTHER; note = 2-Prime-O-Methoxyethyl modified 5-methyl Cytidine
  modified_base 3: mod_base = OTHER; note = 2-Prime-O-Methoxyethyl modified 5-methyl Uridine
  modified_base 14: mod_base = OTHER; note = DNA nucleotide carrying a 6-amino-5-nitro-3-yl-2(1H)-pyridone nucleobase
  modified_base 15: mod_base = OTHER; note = DNA nucleotide carrying a hypoxanthine nucleobase
  modified_base order(17,20,22..26): mod_base = OTHER; note = 2-Prime-Fluoro modified nucleoside
  modified_base order(4..12,16,19,21,27): mod_base = OTHER; note = 2-Prime-O-Methyl modified nucleoside
  modified_base order(1^2,26^27): mod_base = OTHER; note = (1,3-dimethylimidazolidin-2-ylidene) Phosphoramidate linkage
  modified_base order(4..13,14^15,17..26): mod_base = OTHER; note = Phosphorothioate linkage
  modified_base 15^16: mod_base = OTHER; note = Mesylphosphoramidate linkage
  misc_feature 1..27: note = RM107375
catgatgccatacnntgccaccagggc

SEQ ID NO: 1172 - DNA, 27 bp, synthetic construct
  source 1..27: mol_type = other DNA
  misc_feature 14..15: note = DNA
  misc_feature order(1..13,16..27): note = RNA
  modified_base 2: mod_base = OTHER; note = 2-Prime-O-Methoxyethyl modified nucleoside
  modified_base order(1,13,18): mod_base = OTHER; note = 2-Prime-O-Methoxyethyl modified 5-methyl Cytidine
  modified_base 3: mod_base = OTHER; note = 2-Prime-O-Methoxyethyl modified 5-methyl Uridine
  modified_base 14: mod_base = OTHER; note = DNA nucleotide carrying a 6-amino-5-nitro-3-yl-2(1H)-pyridone nucleobase
  modified_base 15: mod_base = OTHER; note = DNA nucleotide carrying a hypoxanthine nucleobase
  modified_base order(7,9,11,17,20,22,24): mod_base = OTHER; note = 2-Prime-Fluoro modified nucleoside
  modified_base order(4..6,8,10,12,16,19,21,23,25..27): mod_base = OTHER; note = 2-Prime-O-Methyl modified nucleoside
  modified_base order(1^2,26^27): mod_base = OTHER; note = Mesylphosphoramidate linkage
  modified_base order(4..13,14^15,17..26): mod_base = OTHER; note = Phosphorothioate linkage
  modified_base 15^16: mod_base = OTHER; note = Methylphosphonate linkage
  misc_feature 1..27: note = RM107376
catgatgccatacnntgccaccagggc

SEQ ID NO: 1173 - DNA, 27 bp, synthetic construct
  source 1..27: mol_type = other DNA
  misc_feature 13..15: note = DNA
  misc_feature order(1..12,16..27): note = RNA
  modified_base 2: mod_base = OTHER; note = 2-Prime-O-Methoxyethyl modified nucleoside
  modified_base order(1,18): mod_base = OTHER; note = 2-Prime-O-Methoxyethyl modified 5-methyl Cytidine
  modified_base 3: mod_base = OTHER; note = 2-Prime-O-Methoxyethyl modified 5-methyl Uridine
  modified_base 14: mod_base = OTHER; note = DNA nucleotide carrying a 6-amino-5-nitro-3-yl-2(1H)-pyridone nucleobase
  modified_base 15: mod_base = OTHER; note = DNA nucleotide carrying a hypoxanthine nucleobase
  modified_base order(7,9,11,17,20,22,24): mod_base = OTHER; note = 2-Prime-Fluoro modified nucleoside
  modified_base order(4..6,8,10,12,16,19,21,23,25..27): mod_base = OTHER; note = 2-Prime-O-Methyl modified nucleoside
  modified_base order(1^2,26^27): mod_base = OTHER; note = Mesylphosphoramidate linkage
  modified_base order(4..15,17..26): mod_base = OTHER; note = Phosphorothioate linkage
  modified_base 15^16: mod_base = OTHER; note = Methylphosphonate linkage
  misc_feature 1..27: note = RM107377
catgatgccatacnntgccaccagggc

SEQ ID NO: 1174 - DNA, 27 bp, synthetic construct
  source 1..27: mol_type = other DNA
  misc_feature 13..15: note = DNA
  misc_feature order(1..12,16..27): note = RNA
  modified_base 2: mod_base = OTHER; note = 2-Prime-O-Methoxyethyl modified nucleoside
  modified_base order(1,18): mod_base = OTHER; note = 2-Prime-O-Methoxyethyl modified 5-methyl Cytidine
  modified_base 3: mod_base = OTHER; note = 2-Prime-O-Methoxyethyl modified 5-methyl Uridine
  modified_base 14: mod_base = OTHER; note = DNA nucleotide carrying a 6-amino-5-nitro-3-yl-2(1H)-pyridone nucleobase
  modified_base 15: mod_base = OTHER; note = DNA nucleotide carrying a hypoxanthine nucleobase
  modified_base order(7,9,11,17,20,22,24): mod_base = OTHER; note = 2-Prime-Fluoro modified nucleoside
  modified_base order(4..6,8,10,12,16,19,21,23,25..27): mod_base = OTHER; note = 2-Prime-O-Methyl modified nucleoside
  modified_base order(1^2,15^16,26^27): mod_base = OTHER; note = Mesylphosphoramidate linkage
  modified_base order(4..15,17..26): mod_base = OTHER; note = Phosphorothioate linkage
  misc_feature 1..27: note = RM107378
catgatgccatacnntgccaccagggc

SEQ ID NO: 1175 - DNA, 27 bp, synthetic construct
  source 1..27: mol_type = other DNA
  misc_feature 14..15: note = DNA
  misc_feature order(1..13,16..27): note = RNA
  modified_base 2: mod_base = OTHER; note = 2-Prime-O-Methoxyethyl modified nucleoside
  modified_base order(1,13,18): mod_base = OTHER; note = 2-Prime-O-Methoxyethyl modified 5-methyl Cytidine
  modified_base 3: mod_base = OTHER; note = 2-Prime-O-Methoxyethyl modified 5-methyl Uridine
  modified_base 14: mod_base = OTHER; note = DNA nucleotide carrying a 6-amino-5-nitro-3-yl-2(1H)-pyridone nucleobase
  modified_base 15: mod_base = OTHER; note = DNA nucleotide carrying a hypoxanthine nucleobase
  modified_base order(7,9,11,17,20,22,24): mod_base = OTHER; note = 2-Prime-Fluoro modified nucleoside
  modified_base order(4..6,8,10,12,16,19,21,23,25..27): mod_base = OTHER; note = 2-Prime-O-Methyl modified nucleoside
  modified_base order(1^2,26^27): mod_base = OTHER; note = Mesylphosphoramidate linkage
  modified_base order(4..13,14^15,17..26): mod_base = OTHER; note = Phosphorothioate linkage
  modified_base 15^16: mod_base = OTHER; note = (1,3-dimethylimidazolidin-2-ylidene) Phosphoramidate linkage
  misc_feature 1..27: note = RM107379
catgatgccatacnntgccaccagggc

SEQ ID NO: 1176 - DNA, 27 bp, synthetic construct
  source 1..27: mol_type = other DNA
  misc_feature 14..15: note = DNA
  misc_feature order(1..13,16..27): note = RNA
  modified_base 2: mod_base = OTHER; note = 2-Prime-O-Methoxyethyl modified nucleoside
  modified_base order(1,13,18): mod_base = OTHER; note = 2-Prime-O-Methoxyethyl modified 5-methyl Cytidine
  modified_base 3: mod_base = OTHER; note = 2-Prime-O-Methoxyethyl modified 5-methyl Uridine
  modified_base 14: mod_base = OTHER; note = DNA nucleotide carrying a 6-amino-5-nitro-3-yl-2(1H)-pyridone nucleobase
  modified_base 15: mod_base = OTHER; note = DNA nucleotide carrying a hypoxanthine nucleobase
  modified_base order(7,9,11,17,20,22,24): mod_base = OTHER; note = 2-Prime-Fluoro modified nucleoside
  modified_base order(4..6,8,10,12,16,19,21,23,25..27): mod_base = OTHER; note = 2-Prime-O-Methyl modified nucleoside
  modified_base order(1^2,15^16,26^27): mod_base = OTHER; note = Mesylphosphoramidate linkage
  modified_base order(4..13,14^15,17..26): mod_base = OTHER; note = Phosphorothioate linkage
  misc_feature 1..27: note = RM107380
catgatgccatacnntgccaccagggc

SEQ ID NO: 1177 - DNA, 25 bp, synthetic construct
  source 1..25: mol_type = other DNA
  misc_feature 14..15: note = DNA
  misc_feature order(1..13,16..25): note = RNA
  modified_base 2: mod_base = OTHER; note = 2-Prime-O-Methoxyethyl modified nucleoside
  modified_base order(1,13,18): mod_base = OTHER; note = 2-Prime-O-Methoxyethyl modified 5-methyl Cytidine
  modified_base 3: mod_base = OTHER; note = 2-Prime-O-Methoxyethyl modified 5-methyl Uridine
  modified_base 14: mod_base = OTHER; note = DNA nucleotide carrying a 6-amino-5-nitro-3-yl-2(1H)-pyridone nucleobase
  modified_base 15: mod_base = OTHER; note = DNA nucleotide carrying a hypoxanthine nucleobase
  modified_base order(8,10,12,17,19,21,23): mod_base = OTHER; note = 2-Prime-Fluoro modified nucleoside
  modified_base order(4..7,9,11,16,20,22,24..25): mod_base = OTHER; note = 2-Prime-O-Methyl modified nucleoside
  modified_base order(1^2,24^25): mod_base = OTHER; note = (1,3-dimethylimidazolidin-2-ylidene) Phosphoramidate linkage
  modified_base order(4..13,14^15,17..24): mod_base = OTHER; note = Phosphorothioate linkage
  modified_base 15^16: mod_base = OTHER; note = Methylphosphonate linkage
  misc_feature 1..25: note = RM107381
catgatgccatacnntgccaccagg

SEQ ID NO: 1178 - DNA, 25 bp, synthetic construct
  source 1..25: mol_type = other DNA
  misc_feature 14..15: note = DNA
  misc_feature order(1..13,16..25): note = RNA
  modified_base 2: mod_base = OTHER; note = 2-Prime-O-Methoxyethyl modified nucleoside
  modified_base order(1,13,18): mod_base = OTHER; note = 2-Prime-O-Methoxyethyl modified 5-methyl Cytidine
  modified_base 3: mod_base = OTHER; note = 2-Prime-O-Methoxyethyl modified 5-methyl Uridine
  modified_base 14: mod_base = OTHER; note = DNA nucleotide carrying a 6-amino-5-nitro-3-yl-2(1H)-pyridone nucleobase
  modified_base 15: mod_base = OTHER; note = DNA nucleotide carrying a hypoxanthine nucleobase
  modified_base order(7,9,11,17,20,22,24): mod_base = OTHER; note = 2-Prime-Fluoro modified nucleoside
  modified_base order(4..6,8,10,12,16,19,21,23,25): mod_base = OTHER; note = 2-Prime-O-Methyl modified nucleoside
  modified_base order(1^2,24^25): mod_base = OTHER; note = (1,3-dimethylimidazolidin-2-ylidene) Phosphoramidate linkage
  modified_base order(4..13,14^15,17..24): mod_base = OTHER; note = Phosphorothioate linkage
  modified_base 15^16: mod_base = OTHER; note = Methylphosphonate linkage
  misc_feature 1..25: note = RM107382
catgatgccatacnntgccaccagg

SEQ ID NO: 1179 - DNA, 25 bp, synthetic construct
  source 1..25: mol_type = other DNA
  misc_feature 14..15: note = DNA
  misc_feature order(1..13,16..25): note = RNA
  modified_base order(13,18): mod_base = OTHER; note = 2-Prime-O-Methoxyethyl modified 5-methyl Cytidine
  modified_base 14: mod_base = OTHER; note = DNA nucleotide carrying a 6-amino-5-nitro-3-yl-2(1H)-pyridone nucleobase
  modified_base 15: mod_base = OTHER; note = DNA nucleotide carrying a hypoxanthine nucleobase
  modified_base order(1..5,7,9,11,17): mod_base = OTHER; note = 2-Prime-Fluoro modified nucleoside
  modified_base order(6,8,10,12,16,19..25): mod_base = OTHER; note = 2-Prime-O-Methyl modified nucleoside
  modified_base order(1^2,24^25): mod_base = OTHER; note = (1,3-dimethylimidazolidin-2-ylidene) Phosphoramidate linkage
  modified_base order(4..13,14^15,17..24): mod_base = OTHER; note = Phosphorothioate linkage
  modified_base 15^16: mod_base = OTHER; note = Methylphosphonate linkage
  misc_feature 1..25: note = RM107383
catgatgccatacnntgccaccagg

SEQ ID NO: 1180 - DNA, 25 bp, synthetic construct
  source 1..25: mol_type = other DNA
  misc_feature 14..15: note = DNA
  misc_feature order(1..13,16..25): note = RNA
  modified_base 2: mod_base = OTHER; note = 2-Prime-O-Methoxyethyl modified nucleoside
  modified_base order(1,13,18): mod_base = OTHER; note = 2-Prime-O-Methoxyethyl modified 5-methyl Cytidine
  modified_base 3: mod_base = OTHER; note = 2-Prime-O-Methoxyethyl modified 5-methyl Uridine
  modified_base 14: mod_base = OTHER; note = DNA nucleotide carrying a 6-amino-5-nitro-3-yl-2(1H)-pyridone nucleobase
  modified_base 15: mod_base = OTHER; note = DNA nucleotide carrying a hypoxanthine nucleobase
  modified_base order(17,20,22..25): mod_base = OTHER; note = 2-Prime-Fluoro modified nucleoside
  modified_base order(4..12,16,19,21): mod_base = OTHER; note = 2-Prime-O-Methyl modified nucleoside
  modified_base order(1^2,24^25): mod_base = OTHER; note = (1,3-dimethylimidazolidin-2-ylidene) Phosphoramidate linkage
  modified_base order(4..13,14^15,17..24): mod_base = OTHER; note = Phosphorothioate linkage
  modified_base 15^16: mod_base = OTHER; note = Methylphosphonate linkage
  misc_feature 1..25: note = RM107384
catgatgccatacnntgccaccagg

SEQ ID NO: 1181 - DNA, 25 bp, synthetic construct
  source 1..25: mol_type = other DNA
  misc_feature 14..15: note = DNA
  misc_feature order(1..13,16..25): note = RNA
  modified_base 2: mod_base = OTHER; note = 2-Prime-O-Methoxyethyl modified nucleoside
  modified_base order(1,13,18): mod_base = OTHER; note = 2-Prime-O-Methoxyethyl modified 5-methyl Cytidine
  modified_base 3: mod_base = OTHER; note = 2-Prime-O-Methoxyethyl modified 5-methyl Uridine
  modified_base 14: mod_base = OTHER; note = DNA nucleotide carrying a 6-amino-5-nitro-3-yl-2(1H)-pyridone nucleobase
  modified_base 15: mod_base = OTHER; note = DNA nucleotide carrying a hypoxanthine nucleobase
  modified_base order(7,9,11,17,20,22,24): mod_base = OTHER; note = 2-Prime-Fluoro modified nucleoside
  modified_base order(4..6,8,10,12,16,19,21,23,25): mod_base = OTHER; note = 2-Prime-O-Methyl modified nucleoside
  modified_base order(1^2,24^25): mod_base = OTHER; note = Mesylphosphoramidate linkage
  modified_base order(4..13,14^15,17..24): mod_base = OTHER; note = Phosphorothioate linkage
  modified_base 15^16: mod_base = OTHER; note = Methylphosphonate linkage
  misc_feature 1..25: note = RM107385
catgatgccatacnntgccaccagg

SEQ ID NO: 1182 - DNA, 30 bp, synthetic construct; identical to SEQ ID NO: 29
  source 1..30: mol_type = other DNA
  misc_feature 24..25: note = DNA
  misc_feature order(1..23,26..30): note = RNA
  modified_base order(23,28): mod_base = OTHER; note = 2-Prime-O-Methoxyethyl modified 5-methyl Cytidine
  modified_base 24: mod_base = OTHER; note = DNA nucleotide carrying a 6-amino-5-nitro-3-yl-2(1H)-pyridone nucleobase
  modified_base 25: mod_base = OTHER; note = DNA nucleotide carrying a hypoxanthine nucleobase
  modified_base order(5..6,9..10,13..14,17..22,27): mod_base = OTHER; note = 2-Prime-Fluoro modified nucleoside
  modified_base order(1..4,7..8,11..12,15..16,26,29..30): mod_base = OTHER; note = 2-Prime-O-Methyl modified nucleoside
  modified_base order(1^2,29^30): mod_base = OTHER; note = (1,3-dimethylimidazolidin-2-ylidene) Phosphoramidate linkage
  modified_base order(2..23,24^25,27..29): mod_base = OTHER; note = Phosphorothioate linkage
  modified_base 25^26: mod_base = OTHER; note = Methylphosphonate linkage
  misc_feature 1..30: note = RM106873

SEQ ID NO: 1183 - DNA, 30 bp, synthetic construct
  source 1..30: mol_type = other DNA
  misc_feature 24..25: note = DNA
  misc_feature order(1..23,26..30): note = RNA
  modified_base order(23,28): mod_base = OTHER; note = 2-Prime-O-Methoxyethyl modified 5-methyl Cytidine
  modified_base 24: mod_base = OTHER; note = DNA nucleotide carrying a 6-amino-5-nitro-3-yl-2(1H)-pyridone nucleobase
  modified_base 25: mod_base = OTHER; note = DNA nucleotide carrying a hypoxanthine nucleobase
  modified_base order(5..6,9..10,13..14,17..22,27): mod_base = OTHER; note = 2-Prime-Fluoro modified nucleoside
  modified_base order(1..4,7..8,11..12,15..16,26,29..30): mod_base = OTHER; note = 2-Prime-O-Methyl modified nucleoside
  modified_base order(1^2,29^30): mod_base = OTHER; note = (1,3-dimethylimidazolidin-2-ylidene) Phosphoramidate linkage
  modified_base order(2..23,24^25,27..29): mod_base = OTHER; note = Phosphorothioate linkage
  modified_base 25^26: mod_base = OTHER; note = Methylphosphonate linkage
  misc_feature 1..30: note = RM106874
ccgtgaggggcatgatgcgttacnntgcca

SEQ ID NO: 1184 - DNA, 38 bp, synthetic construct
  source 1..38: mol_type = other DNA
  misc_feature 25..26: note = DNA
  misc_feature order(1..24,27..38): note = RNA
  modified_base order(5..7,9,14): mod_base = OTHER; note = 2-Prime-O-Methoxyethyl modified nucleoside
  modified_base order(8,24): mod_base = OTHER; note = 2-Prime-O-Methoxyethyl modified 5-methyl Cytidine
  modified_base order(10..13,29): mod_base = OTHER; note = 2-Prime-O-Methoxyethyl modified 5-methyl Uridine
  modified_base 25: mod_base = OTHER; note = DNA nucleotide carrying a 6-amino-5-nitro-3-yl-2(1H)-pyridone nucleobase
  modified_base 26: mod_base = OTHER; note = DNA nucleotide carrying a hypoxanthine nucleobase
  modified_base order(19,21,23,28,30,32,34): mod_base = OTHER; note = 2-Prime-Fluoro modified nucleoside
  modified_base order(1..4,15..18,20,22,27,31,33,35..38): mod_base = OTHER; note = 2-Prime-O-Methyl modified nucleoside
  modified_base order(1..5,15..24,25^26,28..38): mod_base = OTHER; note = Phosphorothioate linkage
  modified_base 26^27: mod_base = OTHER; note = Methylphosphonate linkage
  misc_feature 1..38: note = RM106567
agttggacattttggcatccagtcnncatgctgacagt

SEQ ID NO: 1185 - DNA, 35 bp, synthetic construct
  source 1..35: mol_type = other DNA
  misc_feature 22..23: note = DNA
  misc_feature order(1..21,24..35): note = RNA
  modified_base order(2..4,6,11): mod_base = OTHER; note = 2-Prime-O-Methoxyethyl modified nucleoside
  modified_base order(5,21): mod_base = OTHER; note = 2-Prime-O-Methoxyethyl modified 5-methyl Cytidine
  modified_base order(7..10,26): mod_base = OTHER; note = 2-Prime-O-Methoxyethyl modified 5-methyl Uridine
  modified_base 22: mod_base = OTHER; note = DNA nucleotide carrying a 6-amino-5-nitro-3-yl-2(1H)-pyridone nucleobase
  modified_base 23: mod_base = OTHER; note = DNA nucleotide carrying a hypoxanthine nucleobase
  modified_base order(16,18,20,25,27,29,31): mod_base = OTHER; note = 2-Prime-Fluoro modified nucleoside
  modified_base order(1,12..15,17,19,24,28,30,32..35): mod_base = OTHER; note = 2-Prime-O-Methyl modified nucleoside
  modified_base order(1^2,12..21,22^23,25..35): mod_base = OTHER; note = Phosphorothioate linkage
  modified_base 23^24: mod_base = OTHER; note = Methylphosphonate linkage
  misc_feature 1..35: note = RM106568
tggacattttggcatccagtcnncatgctgacagt

SEQ ID NO: 1186 - DNA, 32 bp, synthetic construct
  source 1..32: mol_type = other DNA
  misc_feature 19..20: note = DNA
  misc_feature order(1..18,21..32): note = RNA
  modified_base order(1,3,8): mod_base = OTHER; note = 2-Prime-O-Methoxyethyl modified nucleoside
  modified_base order(2,18): mod_base = OTHER; note = 2-Prime-O-Methoxyethyl modified 5-methyl Cytidine
  modified_base order(4..7,23): mod_base = OTHER; note = 2-Prime-O-Methoxyethyl modified 5-methyl Uridine
  modified_base 19: mod_base = OTHER; note = DNA nucleotide carrying a 6-amino-5-nitro-3-yl-2(1H)-pyridone nucleobase
  modified_base 20: mod_base = OTHER; note = DNA nucleotide carrying a hypoxanthine nucleobase
  modified_base order(13,15,17,22,24,26,28): mod_base = OTHER; note = 2-Prime-Fluoro modified nucleoside
  modified_base order(9..12,14,16,21,25,27,29..32): mod_base = OTHER; note = 2-Prime-O-Methyl modified nucleoside
  modified_base order(9..18,19^20,22..32): mod_base = OTHER; note = Phosphorothioate linkage
  modified_base 20^21: mod_base = OTHER; note = Methylphosphonate linkage
  misc_feature 1..32: note = RM106569
acattttggcatccagtcnncatgctgacagt

SEQ ID NO: 1187 - DNA, 29 bp, synthetic construct
  source 1..29: mol_type = other DNA
  misc_feature 16..17: note = DNA
  misc_feature order(1..15,18..29): note = RNA
  modified_base 5: mod_base = OTHER; note = 2-Prime-O-Methoxyethyl modified nucleoside
  modified_base 15: mod_base = OTHER; note = 2-Prime-O-Methoxyethyl modified 5-methyl Cytidine
  modified_base order(1..4,20): mod_base = OTHER; note = 2-Prime-O-Methoxyethyl modified 5-methyl Uridine
  modified_base 16: mod_base = OTHER; note = DNA nucleotide carrying a 6-amino-5-nitro-3-yl-2(1H)-pyridone nucleobase
  modified_base 17: mod_base = OTHER; note = DNA nucleotide carrying a hypoxanthine nucleobase
  modified_base order(10,12,14,19,21,23,25): mod_base = OTHER; note = 2-Prime-Fluoro modified nucleoside
  modified_base order(6..9,11,13,18,22,24,26..29): mod_base = OTHER; note = 2-Prime-O-Methyl modified nucleoside
  modified_base order(6..15,16^17,19..29): mod_base = OTHER; note = Phosphorothioate linkage
  modified_base 17^18: mod_base = OTHER; note = Methylphosphonate linkage
  misc_feature 1..29: note = RM106570
ttttggcatccagtcnncatgctgacagt

SEQ ID NO: 1188 - DNA, 27 bp, synthetic construct
  source 1..27: mol_type = other DNA
  misc_feature 14..15: note = DNA
  misc_feature order(1..13,16..27): note = RNA
  modified_base 3: mod_base = OTHER; note = 2-Prime-O-Methoxyethyl modified nucleoside
  modified_base 13: mod_base = OTHER; note = 2-Prime-O-Methoxyethyl modified 5-methyl Cytidine
  modified_base order(1..2,18): mod_base = OTHER; note = 2-Prime-O-Methoxyethyl modified 5-methyl Uridine
  modified_base 14: mod_base = OTHER; note = DNA nucleotide carrying a 6-amino-5-nitro-3-yl-2(1H)-pyridone nucleobase
  modified_base 15: mod_base = OTHER; note = DNA nucleotide carrying a hypoxanthine nucleobase
  modified_base order(8,10,12,17,19,21,23): mod_base = OTHER; note = 2-Prime-Fluoro modified nucleoside
  modified_base order(4..7,9,11,16,20,22,24..27): mod_base = OTHER; note = 2-Prime-O-Methyl modified nucleoside
  modified_base order(4..13,14^15,17..27): mod_base = OTHER; note = Phosphorothioate linkage
  modified_base 15^16: mod_base = OTHER; note = Methylphosphonate linkage
  misc_feature 1..27: note = RM106571
ttggcatccagtcnncatgctgacagt

SEQ ID NO: 1189 - DNA, 25 bp, synthetic construct
  source 1..25: mol_type = other DNA
  misc_feature 12..13: note = DNA
  misc_feature order(1..11,14..25): note = RNA
  modified_base 1: mod_base = OTHER; note = 2-Prime-O-Methoxyethyl modified nucleoside
  modified_base 11: mod_base = OTHER; note = 2-Prime-O-Methoxyethyl modified 5-methyl Cytidine
  modified_base 16: mod_base = OTHER; note = 2-Prime-O-Methoxyethyl modified 5-methyl Uridine
  modified_base 12: mod_base = OTHER; note = DNA nucleotide carrying a 6-amino-5-nitro-3-yl-2(1H)-pyridone nucleobase
  modified_base 13: mod_base = OTHER; note = DNA nucleotide carrying a hypoxanthine nucleobase
  modified_base order(6,8,10,15,17,19,21): mod_base = OTHER; note = 2-Prime-Fluoro modified nucleoside
  modified_base order(2..5,7,9,14,18,20,22..25): mod_base = OTHER; note = 2-Prime-O-Methyl modified nucleoside
  modified_base order(2..11,12^13,15..25): mod_base = OTHER; note = Phosphorothioate linkage
  modified_base 13^14: mod_base = OTHER; note = Methylphosphonate linkage
  misc_feature 1..25: note = RM106572
ggcatccagtcnncatgctgacagt

SEQ ID NO: 1190 - DNA, 23 bp, synthetic construct
  source 1..23: mol_type = other DNA
  misc_feature 10..11: note = DNA
  misc_feature order(1..9,12..23): note = RNA
  modified_base 9: mod_base = OTHER; note = 2-Prime-O-Methoxyethyl modified 5-methyl Cytidine
  modified_base 14: mod_base = OTHER; note = 2-Prime-O-Methoxyethyl modified 5-methyl Uridine
  modified_base 10: mod_base = OTHER; note = DNA nucleotide carrying a 6-amino-5-nitro-3-yl-2(1H)-pyridone nucleobase
  modified_base 11: mod_base = OTHER; note = DNA nucleotide carrying a hypoxanthine nucleobase
  modified_base order(4,6,8,13,15,17,19): mod_base = OTHER; note = 2-Prime-Fluoro modified nucleoside
  modified_base order(1..3,5,7,12,16,18,20..23): mod_base = OTHER; note = 2-Prime-O-Methyl modified nucleoside
  modified_base order(1..9,10^11,13..23): mod_base = OTHER; note = Phosphorothioate linkage
  modified_base 11^12: mod_base = OTHER; note = Methylphosphonate linkage
  misc_feature 1..23: note = RM106573
catccagtcnncatgctgacagt

SEQ ID NO: 1191 - DNA, 21 bp, synthetic construct
  source 1..21: mol_type = other DNA
  misc_feature 8..9: note = DNA
  misc_feature order(1..7,10..21): note = RNA
  modified_base 7: mod_base = OTHER; note = 2-Prime-O-Methoxyethyl modified 5-methyl Cytidine
  modified_base 12: mod_base = OTHER; note = 2-Prime-O-Methoxyethyl modified 5-methyl Uridine
  modified_base 8: mod_base = OTHER; note = DNA nucleotide carrying a 6-amino-5-nitro-3-yl-2(1H)-pyridone nucleobase
  modified_base 9: mod_base = OTHER; note = DNA nucleotide carrying a hypoxanthine nucleobase
  modified_base order(2,4,6,11,13,15,17): mod_base = OTHER; note = 2-Prime-Fluoro modified nucleoside
  modified_base order(1,3,5,10,14,16,18..21): mod_base = OTHER; note = 2-Prime-O-Methyl modified nucleoside
  modified_base order(1..7,8^9,11..21): mod_base = OTHER; note = Phosphorothioate linkage
  modified_base 9^10: mod_base = OTHER; note = Methylphosphonate linkage
  misc_feature 1..21: note = RM106574
tccagtcnncatgctgacagt

SEQ ID NO: 1192 - DNA, 27 bp, synthetic construct
  source 1..27: mol_type = other DNA
  misc_feature 14..15: note = DNA
  misc_feature order(1..13,16..27): note = RNA
  modified_base 13: mod_base = OTHER; note = 2-Prime-O-Methoxyethyl modified 5-methyl Cytidine
  modified_base 18: mod_base = OTHER; note = 2-Prime-O-Methoxyethyl modified 5-methyl Uridine
  modified_base 14: mod_base = OTHER; note = DNA nucleotide carrying a 6-amino-5-nitro-3-yl-2(1H)-pyridone nucleobase
  modified_base 15: mod_base = OTHER; note = DNA nucleotide carrying a hypoxanthine nucleobase
  modified_base order(8,10,12,17,19,21,23): mod_base = OTHER; note = 2-Prime-Fluoro modified nucleoside
  modified_base order(1..7,9,11,16,20,22,24..27): mod_base = OTHER; note = 2-Prime-O-Methyl modified nucleoside
  modified_base order(1..13,14^15,17..27): mod_base = OTHER; note = Phosphorothioate linkage
  modified_base 15^16: mod_base = OTHER; note = Methylphosphonate linkage
  misc_feature 1..27: note = RM106575
ttggcatccagtcnncatgctgacagt

SEQ ID NO: 1193 - DNA, 25 bp, synthetic construct
  source 1..25: mol_type = other DNA
  misc_feature 14..15: note = DNA
  misc_feature order(1..13,16..25): note = RNA
  modified_base 3: mod_base = OTHER; note = 2-Prime-O-Methoxyethyl modified nucleoside
  modified_base 13: mod_base = OTHER; note = 2-Prime-O-Methoxyethyl modified 5-methyl Cytidine
  modified_base order(1..2,18): mod_base = OTHER; note = 2-Prime-O-Methoxyethyl modified 5-methyl Uridine
  modified_base 14: mod_base = OTHER; note = DNA nucleotide carrying a 6-amino-5-nitro-3-yl-2(1H)-pyridone nucleobase
  modified_base 15: mod_base = OTHER; note = DNA nucleotide carrying a hypoxanthine nucleobase
  modified_base order(8,10,12,17,19,21,23): mod_base = OTHER; note = 2-Prime-Fluoro modified nucleoside
  modified_base order(4..7,9,11,16,20,22,24..25): mod_base = OTHER; note = 2-Prime-O-Methyl modified nucleoside
  modified_base order(4..13,14^15,17..25): mod_base = OTHER; note = Phosphorothioate linkage
  modified_base 15^16: mod_base = OTHER; note = Methylphosphonate linkage
  misc_feature 1..25: note = RM106576
ttggcatccagtcnncatgctgaca

SEQ ID NO: 1194 - DNA, 23 bp, synthetic construct
  source 1..23: mol_type = other DNA
  misc_feature 14..15: note = DNA
  misc_feature order(1..13,16..23): note = RNA
  modified_base 3: mod_base = OTHER; note = 2-Prime-O-Methoxyethyl modified nucleoside
  modified_base 13: mod_base = OTHER; note = 2-Prime-O-Methoxyethyl modified 5-methyl Cytidine
  modified_base order(1..2,18): mod_base = OTHER; note = 2-Prime-O-Methoxyethyl modified 5-methyl Uridine
  modified_base 14: mod_base = OTHER; note = DNA nucleotide carrying a 6-amino-5-nitro-3-yl-2(1H)-pyridone nucleobase
  modified_base 15: mod_base = OTHER; note = DNA nucleotide carrying a hypoxanthine nucleobase
  modified_base order(8,10,12,17,19,21,23): mod_base = OTHER; note = 2-Prime-Fluoro modified nucleoside
  modified_base order(4..7,9,11,16,20,22): mod_base = OTHER; note = 2-Prime-O-Methyl modified nucleoside
  modified_base order(4..13,14^15,17..23): mod_base = OTHER; note = Phosphorothioate linkage
  modified_base 15^16: mod_base = OTHER; note = Methylphosphonate linkage
  misc_feature 1..23: note = RM106577
ttggcatccagtcnncatgctga

SEQ ID NO: 1195 - DNA, 21 bp, synthetic construct
  source 1..21: mol_type = other DNA
  misc_feature 14..15: note = DNA
  misc_feature order(1..13,16..21): note = RNA
  modified_base 3: mod_base = OTHER; note = 2-Prime-O-Methoxyethyl modified nucleoside
  modified_base 13: mod_base = OTHER; note = 2-Prime-O-Methoxyethyl modified 5-methyl Cytidine
  modified_base order(1..2,18): mod_base = OTHER; note = 2-Prime-O-Methoxyethyl modified 5-methyl Uridine
  modified_base 14: mod_base = OTHER; note = DNA nucleotide carrying a 6-amino-5-nitro-3-yl-2(1H)-pyridone nucleobase
  modified_base 15: mod_base = OTHER; note = DNA nucleotide carrying a hypoxanthine nucleobase
  modified_base order(8,10,12,17,19,21): mod_base = OTHER; note = 2-Prime-Fluoro modified nucleoside
  modified_base order(4..7,9,11,16,20): mod_base = OTHER; note = 2-Prime-O-Methyl modified nucleoside
  modified_base order(4..13,14^15,17..21): mod_base = OTHER; note = Phosphorothioate linkage
  modified_base 15^16: mod_base = OTHER; note = Methylphosphonate linkage
  misc_feature 1..21: note = RM106578
ttggcatccagtcnncatgct

SEQ ID NO: 1196 - DNA, 19 bp, synthetic construct
  source 1..19: mol_type = other DNA
  misc_feature 14..15: note = DNA
  misc_feature order(1..13,16..19): note = RNA
  modified_base 3: mod_base = OTHER; note = 2-Prime-O-Methoxyethyl modified nucleoside
  modified_base 13: mod_base = OTHER; note = 2-Prime-O-Methoxyethyl modified 5-methyl Cytidine
  modified_base order(1..2,18): mod_base = OTHER; note = 2-Prime-O-Methoxyethyl modified 5-methyl Uridine
  modified_base 14: mod_base = OTHER; note = DNA nucleotide carrying a 6-amino-5-nitro-3-yl-2(1H)-pyridone nucleobase
  modified_base 15: mod_base = OTHER; note = DNA nucleotide carrying a hypoxanthine nucleobase
  modified_base order(8,10,12,17,19): mod_base = OTHER; note = 2-Prime-Fluoro modified nucleoside
  modified_base order(4..7,9,11,16): mod_base = OTHER; note = 2-Prime-O-Methyl modified nucleoside
  modified_base order(4..13,14^15,17..19): mod_base = OTHER; note = Phosphorothioate linkage
  modified_base 15^16: mod_base = OTHER; note = Methylphosphonate linkage
  misc_feature 1..19: note = RM106579
ttggcatccagtcnncatg

SEQ ID NO: 1197 - DNA, 30 bp, synthetic construct
  source 1..30: mol_type = other DNA
  misc_feature 23..25: note = DNA
  misc_feature order(1..22,26..30): note = RNA
  modified_base 24: mod_base = OTHER; note = DNA nucleotide carrying a 6-amino-5-nitro-3-yl-2(1H)-pyridone nucleobase
  modified_base 25: mod_base = OTHER; note = DNA nucleotide carrying a hypoxanthine nucleobase
  modified_base order(4..5,8..9,11,13..15,17..19,22,27): mod_base = OTHER; note = 2-Prime-Fluoro modified nucleoside
  modified_base order(1..3,6..7,10,12,16,20..21,26,28..30): mod_base = OTHER; note = 2-Prime-O-Methyl modified nucleoside
  modified_base order(1^2,11^12,14^15,25^26,29^30): mod_base = OTHER; note = (1,3-dimethylimidazolidin-2-ylidene) Phosphoramidate linkage
  modified_base order(2..6,7..9,10^11,13^14,16..20,22..25,27..29): mod_base = OTHER; note = Phosphorothioate linkage
  modified_base 23: mod_base = m5c; note = 5-methylcytidine
  misc_feature 1..30: note = RM106580
gttggacattttggcatccagtcnncatgc

SEQ ID NO: 1198 - DNA, 30 bp, synthetic construct; identical to SEQ ID NO: 1197
  source 1..30: mol_type = other DNA
  misc_feature 24..25: note = DNA
  misc_feature order(1..23,26..30): note = RNA
  modified_base 23: mod_base = OTHER; note = 2-Prime-O-Methoxyethyl modified 5-methyl Cytidine
  modified_base 28: mod_base = OTHER; note = 2-Prime-O-Methoxyethyl modified 5-methyl Uridine
  modified_base 24: mod_base = OTHER; note = DNA nucleotide carrying a 6-amino-5-nitro-3-yl-2(1H)-pyridone nucleobase
  modified_base 25: mod_base = OTHER; note = DNA nucleotide carrying a hypoxanthine nucleobase
  modified_base order(4..5,8..9,11,13..15,17..19,22,27): mod_base = OTHER; note = 2-Prime-Fluoro modified nucleoside
  modified_base order(1..3,6..7,10,12,16,20..21,26,29..30): mod_base = OTHER; note = 2-Prime-O-Methyl modified nucleoside
  modified_base order(1^2,11^12,14^15,29^30): mod_base = OTHER; note = (1,3-dimethylimidazolidin-2-ylidene) Phosphoramidate linkage
  modified_base order(2..6,7..9,10^11,13^14,16..20,22^23,24^25,27..29): mod_base = OTHER; note = Phosphorothioate linkage
  modified_base 25^26: mod_base = OTHER; note = Methylphosphonate linkage
  misc_feature 1..30: note = RM106581

SEQ ID NO: 1199 - DNA, 30 bp, synthetic construct; identical to SEQ ID NO: 1197
  source 1..30: mol_type = other DNA
  misc_feature 23..25: note = DNA
  misc_feature order(1..22,26..30): note = RNA
  modified_base order(6,16,20..21): mod_base = OTHER; note = 2-Prime-O-Methoxyethyl modified nucleoside
  modified_base 7: mod_base = OTHER; note = 2-Prime-O-Methoxyethyl modified 5-methyl Cytidine
  modified_base 10: mod_base = OTHER; note = 2-Prime-O-Methoxyethyl modified 5-methyl Uridine
  modified_base 24: mod_base = OTHER; note = DNA nucleotide carrying a 6-amino-5-nitro-3-yl-2(1H)-pyridone nucleobase
  modified_base 25: mod_base = OTHER; note = DNA nucleotide carrying a hypoxanthine nucleobase
  modified_base order(4..5,8,13..14,18..19,22,27): mod_base = OTHER; note = 2-Prime-Fluoro modified nucleoside
  modified_base order(1..3,9,11..12,15,17,26,28..30): mod_base = OTHER; note = 2-Prime-O-Methyl modified nucleoside
  modified_base order(1^2,11^12,14^15,19^20,25^26,29^30): mod_base = OTHER; note = (1,3-dimethylimidazolidin-2-ylidene) Phosphoramidate linkage
  modified_base order(2..6,8^9,10^11,13^14,17..19,22..25,27..29): mod_base = OTHER; note = Phosphorothioate linkage
  modified_base 23: mod_base = m5c; note = 5-methylcytidine
  misc_feature 1..30: note = RM106582

SEQ ID NO: 1200 - DNA, 30 bp, synthetic construct; identical to SEQ ID NO: 1197
  source 1..30: mol_type = other DNA
  misc_feature 24..25: note = DNA
  misc_feature order(1..23,26..30): note = RNA
  modified_base order(6,16,20..21): mod_base = OTHER; note = 2-Prime-O-Methoxyethyl modified nucleoside
  modified_base order(7,23): mod_base = OTHER; note = 2-Prime-O-Methoxyethyl modified 5-methyl Cytidine
  modified_base order(10,28): mod_base = OTHER; note = 2-Prime-O-Methoxyethyl modified 5-methyl Uridine
  modified_base 24: mod_base = OTHER; note = DNA nucleotide carrying a 6-amino-5-nitro-3-yl-2(1H)-pyridone nucleobase
  modified_base 25: mod_base = OTHER; note = DNA nucleotide carrying a hypoxanthine nucleobase
  modified_base order(4..5,8,13..14,18..19,22,27): mod_base = OTHER; note = 2-Prime-Fluoro modified nucleoside
  modified_base order(1..3,9,11..12,15,17,26,29..30): mod_base = OTHER; note = 2-Prime-O-Methyl modified nucleoside
  modified_base order(1^2,11^12,14^15,19^20,29^30): mod_base = OTHER; note = (1,3-dimethylimidazolidin-2-ylidene) Phosphoramidate linkage
  modified_base order(2..6,8^9,10^11,13^14,17..19,22^23,24^25,27..29): mod_base = OTHER; note = Phosphorothioate linkage
  modified_base 25^26: mod_base = OTHER; note = Methylphosphonate linkage
  misc_feature 1..30: note = RM106583

SEQ ID NO: 1201 - DNA, 30 bp, synthetic construct; identical to SEQ ID NO: 1197
  source 1..30: mol_type = other DNA
  misc_feature 24..25: note = DNA
  misc_feature order(1..23,26..30): note = RNA
  modified_base 23: mod_base = OTHER; note = 2-Prime-O-Methoxyethyl modified 5-methyl Cytidine
  modified_base 28: mod_base = OTHER; note = 2-Prime-O-Methoxyethyl modified 5-methyl Uridine
  modified_base 24: mod_base = OTHER; note = DNA nucleotide carrying a 6-amino-5-nitro-3-yl-2(1H)-pyridone nucleobase
  modified_base 25: mod_base = OTHER; note = DNA nucleotide carrying a hypoxanthine nucleobase
  modified_base order(4..5,8..9,11,13..15,17..19,22,27): mod_base = OTHER; note = 2-Prime-Fluoro modified nucleoside
  modified_base order(1..3,6..7,10,12,16,20..21,26,29..30): mod_base = OTHER; note = 2-Prime-O-Methyl modified nucleoside
  modified_base order(1^2,11^12,14^15,29^30): mod_base = OTHER; note = (1,3-dimethylimidazolidin-2-ylidene) Phosphoramidate linkage
  modified_base order(2..6,7..9,10^11,13^14,16..20,22^23,24^25,27..29): mod_base = OTHER; note = Phosphorothioate linkage
  modified_base 25^26: mod_base = OTHER; note = Methylphosphonate linkage
  misc_feature 1..30: note = RM107274

SEQ ID NO: 1202 - DNA, 30 bp, synthetic construct; identical to SEQ ID NO: 1197
  source 1..30: mol_type = other DNA
  misc_feature 23..25: note = DNA
  misc_feature order(1..22,26..30): note = RNA
  modified_base 28: mod_base = OTHER; note = 2-Prime-O-Methoxyethyl modified 5-methyl Uridine
  modified_base 24: mod_base = OTHER; note = DNA nucleotide carrying a 6-amino-5-nitro-3-yl-2(1H)-pyridone nucleobase
  modified_base 25: mod_base = OTHER; note = DNA nucleotide carrying a hypoxanthine nucleobase
  modified_base order(4..5,8..9,11,13..15,17,19,22,27): mod_base = OTHER; note = 2-Prime-Fluoro modified nucleoside
  modified_base order(1..3,6..7,10,12,16,18,20..21,26,29..30): mod_base = OTHER; note = 2-Prime-O-Methyl modified nucleoside
  modified_base order(1^2,11^12,14^15,29^30): mod_base = OTHER; note = (1,3-dimethylimidazolidin-2-ylidene) Phosphoramidate linkage
  modified_base order(2..6,7..9,10^11,13^14,16..20,22..25,27..29): mod_base = OTHER; note = Phosphorothioate linkage
  modified_base 25^26: mod_base = OTHER; note = Methylphosphonate linkage
  misc_feature 1..30: note = RM107275

SEQ ID NO: 1203 - DNA, 30 bp, synthetic construct; identical to SEQ ID NO: 1197
  source 1..30: mol_type = other DNA
  misc_feature 23..25: note = DNA
  misc_feature order(1..22,26..30): note = RNA
  modified_base 28: mod_base = OTHER; note = 2-Prime-O-Methoxyethyl modified 5-methyl Uridine
  modified_base 24: mod_base = OTHER; note = DNA nucleotide carrying a 6-amino-5-nitro-3-yl-2(1H)-pyridone nucleobase
  modified_base 25: mod_base = OTHER; note = DNA nucleotide carrying a hypoxanthine nucleobase
  modified_base order(4..5,8..9,11,13..15,17,19,22,27): mod_base = OTHER; note = 2-Prime-Fluoro modified nucleoside
  modified_base order(1..3,6..7,10,12,16,18,20..21,26,29..30): mod_base = OTHER; note = 2-Prime-O-Methyl modified nucleoside
  modified_base order(1^2,11^12,14^15,29^30): mod_base = OTHER; note = (1,3-dimethylimidazolidin-2-ylidene) Phosphoramidate linkage
  modified_base order(2..6,7..9,10^11,13^14,16..20,22..25,27..29): mod_base = OTHER; note = Phosphorothioate linkage
  modified_base 25^26: mod_base = OTHER; note = Mesylphosphoramidate linkage
  misc_feature 1..30: note = RM107276

SEQ ID NO: 1204 - DNA, 30 bp, synthetic construct; identical to SEQ ID NO: 1197
  source 1..30: mol_type = other DNA
  misc_feature 24..25: note = DNA
  misc_feature order(1..23,26..30): note = RNA
  modified_base 23: mod_base = OTHER; note = 2-Prime-O-Methoxyethyl modified 5-methyl Cytidine
  modified_base 28: mod_base = OTHER; note = 2-Prime-O-Methoxyethyl modified 5-methyl Uridine
  modified_base 24: mod_base = OTHER; note = DNA nucleotide carrying a 6-amino-5-nitro-3-yl-2(1H)-pyridone nucleobase
  modified_base 25: mod_base = OTHER; note = DNA nucleotide carrying a hypoxanthine nucleobase
  modified_base order(4..5,8..9,11,13..15,17,19,22,27): mod_base = OTHER; note = 2-Prime-Fluoro modified nucleoside
  modified_base order(1..3,6..7,10,12,16,18,20..21,26,29..30): mod_base = OTHER; note = 2-Prime-O-Methyl modified nucleoside
  modified_base order(1^2,11^12,14^15,25^26,29^30): mod_base = OTHER; note = (1,3-dimethylimidazolidin-2-ylidene) Phosphoramidate linkage
  modified_base order(2..6,7..9,10^11,13^14,16..20,22^23,24^25,27..29): mod_base = OTHER; note = Phosphorothioate linkage
  misc_feature 1..30: note = RM107277

SEQ ID NO: 1205 - DNA, 30 bp, synthetic construct; identical to SEQ ID NO: 1197
  source 1..30: mol_type = other DNA
  misc_feature 24..25: note = DNA
  misc_feature order(1..23,26..30): note = RNA
  modified_base 23: mod_base = OTHER; note = 2-Prime-O-Methoxyethyl modified 5-methyl Cytidine
  modified_base 28: mod_base = OTHER; note = 2-Prime-O-Methoxyethyl modified 5-methyl Uridine
  modified_base 24: mod_base = OTHER; note = DNA nucleotide carrying a 6-amino-5-nitro-3-yl-2(1H)-pyridone nucleobase
  modified_base 25: mod_base = OTHER; note = DNA nucleotide carrying a hypoxanthine nucleobase
  modified_base order(4..5,8..9,11,13..15,17,19,22,27): mod_base = OTHER; note = 2-Prime-Fluoro modified nucleoside
  modified_base order(1..3,6..7,10,12,16,18,20..21,26,29..30): mod_base = OTHER; note = 2-Prime-O-Methyl modified nucleoside
  modified_base order(1^2,11^12,14^15,29^30): mod_base = OTHER; note = (1,3-dimethylimidazolidin-2-ylidene) Phosphoramidate linkage
  modified_base order(2..6,7..9,10^11,13^14,16..20,22^23,24^25,27..29): mod_base = OTHER; note = Phosphorothioate linkage
  modified_base 25^26: mod_base = OTHER; note = Mesylphosphoramidate linkage
  misc_feature 1..30: note = RM107278

SEQ ID NO: 1206 - DNA, 30 bp, synthetic construct; identical to SEQ ID NO: 1197
  source 1..30: mol_type = other DNA
  misc_feature 24..25: note = DNA
  misc_feature order(1..23,26..30): note = RNA
  modified_base 23: mod_base = OTHER; note = 2-Prime-O-Methoxyethyl modified 5-methyl Cytidine
  modified_base 28: mod_base = OTHER; note = 2-Prime-O-Methoxyethyl modified 5-methyl Uridine
  modified_base 24: mod_base = OTHER; note = DNA nucleotide carrying a 6-amino-5-nitro-3-yl-2(1H)-pyridone nucleobase
  modified_base 25: mod_base = OTHER; note = DNA nucleotide carrying a hypoxanthine nucleobase
  modified_base order(4..5,8..9,11..15,17,19,22,27): mod_base = OTHER; note = 2-Prime-Fluoro modified nucleoside
  modified_base order(1..3,6..7,10,16,18,20..21,26,29..30): mod_base = OTHER; note = 2-Prime-O-Methyl modified nucleoside
  modified_base order(1^2,11^12,14^15,29^30): mod_base = OTHER; note = (1,3-dimethylimidazolidin-2-ylidene) Phosphoramidate linkage
  modified_base order(2..6,7..9,10^11,13^14,16..20,22^23,24^25,27..29): mod_base = OTHER; note = Phosphorothioate linkage
  modified_base 25^26: mod_base = OTHER; note = Methylphosphonate linkage
  misc_feature 1..30: note = RM107279

SEQ ID NO: 1207 - DNA, 30 bp, synthetic construct; identical to SEQ ID NO: 1197
  source 1..30: mol_type = other DNA
  misc_feature 23..25: note = DNA
  misc_feature order(1..22,26..30): note = RNA
  modified_base 28: mod_base = OTHER; note = 2-Prime-O-Methoxyethyl modified 5-methyl Uridine
  modified_base 24: mod_base = OTHER; note = DNA nucleotide carrying a 6-amino-5-nitro-3-yl-2(1H)-pyridone nucleobase
  modified_base 25: mod_base = OTHER; note = DNA nucleotide carrying a hypoxanthine nucleobase
  modified_base order(4..5,8..9,11..15,17,19,22,27): mod_base = OTHER; note = 2-Prime-Fluoro modified nucleoside
  modified_base order(1..3,6..7,10,16,18,20..21,26,29..30): mod_base = OTHER; note = 2-Prime-O-Methyl modified nucleoside
  modified_base order(1^2,11^12,14^15,29^30): mod_base = OTHER; note = (1,3-dimethylimidazolidin-2-ylidene) Phosphoramidate linkage
  modified_base order(2..6,7..9,10^11,13^14,16..20,22..25,27..29): mod_base = OTHER; note = Phosphorothioate linkage
  modified_base 25^26: mod_base = OTHER; note = Methylphosphonate linkage
  misc_feature 1..30: note = RM107280

SEQ ID NO: 1208 - DNA, 30 bp, synthetic construct; identical to SEQ ID NO: 1197
  source 1..30: mol_type = other DNA
  misc_feature 23..25: note = DNA
  misc_feature order(1..22,26..30): note = RNA
  modified_base 28: mod_base = OTHER; note = 2-Prime-O-Methoxyethyl modified 5-methyl Uridine
  modified_base 24: mod_base = OTHER; note = DNA nucleotide carrying a 6-amino-5-nitro-3-yl-2(1H)-pyridone nucleobase
  modified_base 25: mod_base = OTHER; note = DNA nucleotide carrying a hypoxanthine nucleobase
  modified_base order(4..5,8..9,11..15,17,19,22,27): mod_base = OTHER; note = 2-Prime-Fluoro modified nucleoside
  modified_base order(1..3,6..7,10,16,18,20..21,26,29..30): mod_base = OTHER; note = 2-Prime-O-Methyl modified nucleoside
  modified_base order(1^2,11^12,14^15,29^30): mod_base = OTHER; note = (1,3-dimethylimidazolidin-2-ylidene) Phosphoramidate linkage
  modified_base order(2..6,7..9,10^11,13^14,16..20,22..25,27..29): mod_base = OTHER; note = Phosphorothioate linkage
  modified_base 25^26: mod_base = OTHER; note = Mesylphosphoramidate linkage
  misc_feature 1..30: note = RM107281

SEQ ID NO: 1209 - DNA, 30 bp, synthetic construct; identical to SEQ ID NO: 1197
  source 1..30: mol_type = other DNA
  misc_feature 24..25: note = DNA
  misc_feature order(1..23,26..30): note = RNA
  modified_base 23: mod_base = OTHER; note = 2-Prime-O-Methoxyethyl modified 5-methyl Cytidine
  modified_base 28: mod_base = OTHER; note = 2-Prime-O-Methoxyethyl modified 5-methyl Uridine
  modified_base 24: mod_base = OTHER; note = DNA nucleotide carrying a 6-amino-5-nitro-3-yl-2(1H)-pyridone nucleobase
  modified_base 25: mod_base = OTHER; note = DNA nucleotide carrying a hypoxanthine nucleobase
  modified_base order(4..5,8..9,11..15,17,19,22,27): mod_base = OTHER; note = 2-Prime-Fluoro modified nucleoside
  modified_base order(1..3,6..7,10,16,18,20..21,26,29..30): mod_base = OTHER; note = 2-Prime-O-Methyl modified nucleoside
  modified_base order(1^2,11^12,14^15,25^26,29^30): mod_base = OTHER; note = (1,3-dimethylimidazolidin-2-ylidene) Phosphoramidate linkage
  modified_base order(2..6,7..9,10^11,13^14,16..20,22^23,24^25,27..29): mod_base = OTHER; note = Phosphorothioate linkage
  misc_feature 1..30: note = RM107282

SEQ ID NO: 1210 - DNA, 30 bp, synthetic construct; identical to SEQ ID NO: 1197
  source 1..30: mol_type = other DNA
  misc_feature 24..25: note = DNA
  misc_feature order(1..23,26..30): note = RNA
  modified_base 23: mod_base = OTHER; note = 2-Prime-O-Methoxyethyl modified 5-methyl Cytidine
  modified_base 28: mod_base = OTHER; note = 2-Prime-O-Methoxyethyl modified 5-methyl Uridine
  modified_base 24: mod_base = OTHER; note = DNA nucleotide carrying a 6-amino-5-nitro-3-yl-2(1H)-pyridone nucleobase
  modified_base 25: mod_base = OTHER; note = DNA nucleotide carrying a hypoxanthine nucleobase
  modified_base order(4..5,8..9,11..15,17,19,22,27): mod_base = OTHER; note = 2-Prime-Fluoro modified nucleoside
  modified_base order(1..3,6..7,10,16,18,20..21,26,29..30): mod_base = OTHER; note = 2-Prime-O-Methyl modified nucleoside
  modified_base order(1^2,11^12,14^15,29^30): mod_base = OTHER; note = (1,3-dimethylimidazolidin-2-ylidene) Phosphoramidate linkage
  modified_base order(2..6,7..9,10^11,13^14,16..20,22^23,24^25,27..29): mod_base = OTHER; note = Phosphorothioate linkage
  modified_base 25^26: mod_base = OTHER; note = Mesylphosphoramidate linkage
  misc_feature 1..30: note = RM107283

SEQ ID NO: 1211 - DNA, 30 bp, synthetic construct; identical to SEQ ID NO: 1197
  source 1..30: mol_type = other DNA
  misc_feature 24..25: note = DNA
  misc_feature order(1..23,26..30): note = RNA
  modified_base 23: mod_base = OTHER; note = 2-Prime-O-Methoxyethyl modified 5-methyl Cytidine
  modified_base 28: mod_base = OTHER; note = 2-Prime-O-Methoxyethyl modified 5-methyl Uridine
  modified_base 24: mod_base = OTHER; note = DNA nucleotide carrying a 6-amino-5-nitro-3-yl-2(1H)-pyridone nucleobase
  modified_base 25: mod_base = OTHER; note = DNA nucleotide carrying a hypoxanthine nucleobase
  modified_base order(4..5,8,11..14,19,22,27): mod_base = OTHER; note = 2-Prime-Fluoro modified nucleoside
  modified_base order(1..3,6..7,9..10,15..18,20..21,26,29..30): mod_base = OTHER; note = 2-Prime-O-Methyl modified nucleoside
  modified_base order(1^2,11^12,14^15,29^30): mod_base = OTHER; note = (1,3-dimethylimidazolidin-2-ylidene) Phosphoramidate linkage
  modified_base order(2..6,7..9,10^11,13^14,16..20,22^23,24^25,27..29): mod_base = OTHER; note = Phosphorothioate linkage
  modified_base 25^26: mod_base = OTHER; note = Methylphosphonate linkage
  misc_feature 1..30: note = RM107284

SEQ ID NO: 1212 - DNA, 30 bp, synthetic construct; identical to SEQ ID NO: 1197
  source 1..30: mol_type = other DNA
  misc_feature 23..25: note = DNA
  misc_feature order(1..22,26..30): note = RNA
  modified_base 28: mod_base = OTHER; note = 2-Prime-O-Methoxyethyl modified 5-methyl Uridine
  modified_base 24: mod_base = OTHER; note = DNA nucleotide carrying a 6-amino-5-nitro-3-yl-2(1H)-pyridone nucleobase
  modified_base 25: mod_base = OTHER; note = DNA nucleotide carrying a hypoxanthine nucleobase
  modified_base order(4..5,8,11..14,19,22,27): mod_base = OTHER; note = 2-Prime-Fluoro modified nucleoside
  modified_base order(1..3,6..7,9..10,15..18,20..21,26,29..30): mod_base = OTHER; note = 2-Prime-O-Methyl modified nucleoside
  modified_base order(1^2,11^12,14^15,29^30): mod_base = OTHER; note = (1,3-dimethylimidazolidin-2-ylidene) Phosphoramidate linkage
  modified_base order(2..6,7..9,10^11,13^14,16..20,22..25,27..29): mod_base = OTHER; note = Phosphorothioate linkage
  modified_base 25^26: mod_base = OTHER; note = Methylphosphonate linkage
  misc_feature 1..30: note = RM107285

SEQ ID NO: 1213 - DNA, 30 bp, synthetic construct; identical to SEQ ID NO: 1197
  source 1..30: mol_type = other DNA
  misc_feature 23..25: note = DNA
  misc_feature order(1..22,26..30): note = RNA
  modified_base 28: mod_base = OTHER; note = 2-Prime-O-Methoxyethyl modified 5-methyl Uridine
  modified_base 24: mod_base = OTHER; note = DNA nucleotide carrying a 6-amino-5-nitro-3-yl-2(1H)-pyridone nucleobase
  modified_base 25: mod_base = OTHER; note = DNA nucleotide carrying a hypoxanthine nucleobase
  modified_base order(4..5,8,11..14,19,22,27): mod_base = OTHER; note = 2-Prime-Fluoro modified nucleoside
  modified_base order(1..3,6..7,9..10,15..18,20..21,26,29..30): mod_base = OTHER; note = 2-Prime-O-Methyl modified nucleoside
  modified_base order(1^2,11^12,14^15,29^30): mod_base = OTHER; note = (1,3-dimethylimidazolidin-2-ylidene) Phosphoramidate linkage
  modified_base order(2..6,7..9,10^11,13^14,16..20,22..25,27..29): mod_base = OTHER; note = Phosphorothioate linkage
  modified_base 25^26: mod_base = OTHER; note = Mesylphosphoramidate linkage
  misc_feature 1..30: note = RM107286

SEQ ID NO: 1214 - DNA, 30 bp, synthetic construct; identical to SEQ ID NO: 1197
  source 1..30: mol_type = other DNA
  misc_feature 24..25: note = DNA
  misc_feature order(1..23,26..30): note = RNA
  modified_base 23: mod_base = OTHER; note = 2-Prime-O-Methoxyethyl modified 5-methyl Cytidine
  modified_base 28: mod_base = OTHER; note = 2-Prime-O-Methoxyethyl modified 5-methyl Uridine
  modified_base 24: mod_base = OTHER; note = DNA nucleotide carrying a 6-amino-5-nitro-3-yl-2(1H)-pyridone nucleobase
  modified_base 25: mod_base = OTHER; note = DNA nucleotide carrying a hypoxanthine nucleobase
  modified_base order(4..5,8,11..14,19,22,27): mod_base = OTHER; note = 2-Prime-Fluoro modified nucleoside
  modified_base order(1..3,6..7,9..10,15..18,20..21,26,29..30): mod_base = OTHER; note = 2-Prime-O-Methyl modified nucleoside
  modified_base order(1^2,11^12,14^15,25^26,29^30): mod_base = OTHER; note = (1,3-dimethylimidazolidin-2-ylidene) Phosphoramidate linkage
  modified_base order(2..6,7..9,10^11,13^14,16..20,22^23,24^25,27..29): mod_base = OTHER; note = Phosphorothioate linkage
  misc_feature 1..30: note = RM107287

SEQ ID NO: 1215 - DNA, 30 bp, synthetic construct; identical to SEQ ID NO: 1197
  source 1..30: mol_type = other DNA
  misc_feature 24..25: note = DNA
  misc_feature order(1..23,26..30): note = RNA
  modified_base 23: mod_base = OTHER; note = 2-Prime-O-Methoxyethyl modified 5-methyl Cytidine
  modified_base 28: mod_base = OTHER; note = 2-Prime-O-Methoxyethyl modified 5-methyl Uridine
  modified_base 24: mod_base = OTHER; note = DNA nucleotide carrying a 6-amino-5-nitro-3-yl-2(1H)-pyridone nucleobase
  modified_base 25: mod_base = OTHER; note = DNA nucleotide carrying a hypoxanthine nucleobase
  modified_base order(4..5,8,11..14,19,22,27): mod_base = OTHER; note = 2-Prime-Fluoro modified nucleoside
  modified_base order(1..3,6..7,9..10,15..18,20..21,26,29..30): mod_base = OTHER; note = 2-Prime-O-Methyl modified nucleoside
  modified_base order(1^2,11^12,14^15,29^30): mod_base = OTHER; note = (1,3-dimethylimidazolidin-2-ylidene) Phosphoramidate linkage
  modified_base order(2..6,7..9,10^11,13^14,16..20,22^23,24^25,27..29): mod_base = OTHER; note = Phosphorothioate linkage
  modified_base 25^26: mod_base = OTHER; note = Mesylphosphoramidate linkage
  misc_feature 1..30: note = RM107288

SEQ ID NO: 1216 - DNA, 30 bp, synthetic construct; identical to SEQ ID NO: 1197
  source 1..30: mol_type = other DNA
  misc_feature 24..25: note = DNA
  misc_feature order(1..23,26..30): note = RNA
  modified_base order(6,16,20..21): mod_base = OTHER; note = 2-Prime-O-Methoxyethyl modified nucleoside
  modified_base order(7,23): mod_base = OTHER; note = 2-Prime-O-Methoxyethyl modified 5-methyl Cytidine
  modified_base order(10,28): mod_base = OTHER; note = 2-Prime-O-Methoxyethyl modified 5-methyl Uridine
  modified_base 24: mod_base = OTHER; note = DNA nucleotide carrying a 6-amino-5-nitro-3-yl-2(1H)-pyridone nucleobase
  modified_base 25: mod_base = OTHER; note = DNA nucleotide carrying a hypoxanthine nucleobase
  modified_base order(4..5,8,13..14,18..19,22,27): mod_base = OTHER; note = 2-Prime-Fluoro modified nucleoside
  modified_base order(1..3,9,11..12,15,17,26,29..30): mod_base = OTHER; note = 2-Prime-O-Methyl modified nucleoside
  modified_base order(1^2,11^12,14^15,19^20,29^30): mod_base = OTHER; note = (1,3-dimethylimidazolidin-2-ylidene) Phosphoramidate linkage
  modified_base order(2..6,8^9,10^11,13^14,17..19,22^23,24^25,27..29): mod_base = OTHER; note = Phosphorothioate linkage
  modified_base 25^26: mod_base = OTHER; note = Methylphosphonate linkage
  misc_feature 1..30: note = RM107289

SEQ ID NO: 1217 - DNA, 30 bp, synthetic construct; identical to SEQ ID NO: 1197
  source 1..30: mol_type = other DNA
  misc_feature 23..25: note = DNA
  misc_feature order(1..22,26..30): note = RNA
  modified_base order(6,16,20..21): mod_base = OTHER; note = 2-Prime-O-Methoxyethyl modified nucleoside
  modified_base 7: mod_base = OTHER; note = 2-Prime-O-Methoxyethyl modified 5-methyl Cytidine
  modified_base order(10,28): mod_base = OTHER; note = 2-Prime-O-Methoxyethyl modified 5-methyl Uridine
  modified_base 24: mod_base = OTHER; note = DNA nucleotide carrying a 6-amino-5-nitro-3-yl-2(1H)-pyridone nucleobase
  modified_base 25: mod_base = OTHER; note = DNA nucleotide carrying a hypoxanthine nucleobase
  modified_base order(4..5,8,13..14,18..19,22,27): mod_base = OTHER; note = 2-Prime-Fluoro modified nucleoside
  modified_base order(1..3,9,11..12,15,17,26,29..30): mod_base = OTHER; note = 2-Prime-O-Methyl modified nucleoside
  modified_base order(1^2,11^12,14^15,19^20,29^30): mod_base = OTHER; note = (1,3-dimethylimidazolidin-2-ylidene) Phosphoramidate linkage
  modified_base order(2..6,8^9,10^11,13^14,17..19,22..25,27..29): mod_base = OTHER; note = Phosphorothioate linkage
  modified_base 25^26: mod_base = OTHER; note = Methylphosphonate linkage
  misc_feature 1..30: note = RM107290

SEQ ID NO: 1218 - DNA, 30 bp, synthetic construct; identical to SEQ ID NO: 1197
  source 1..30: mol_type = other DNA
  misc_feature 23..25: note = DNA
  misc_feature order(1..22,26..30): note = RNA
  modified_base order(6,16,20..21): mod_base = OTHER; note = 2-Prime-O-Methoxyethyl modified nucleoside
  modified_base 7: mod_base = OTHER; note = 2-Prime-O-Methoxyethyl modified 5-methyl Cytidine
  modified_base order(10,28): mod_base = OTHER; note = 2-Prime-O-Methoxyethyl modified 5-methyl Uridine
  modified_base 24: mod_base = OTHER; note = DNA nucleotide carrying a 6-amino-5-nitro-3-yl-2(1H)-pyridone nucleobase
  modified_base 25: mod_base = OTHER; note = DNA nucleotide carrying a hypoxanthine nucleobase
  modified_base order(4..5,8,13..14,18..19,22,27): mod_base = OTHER; note = 2-Prime-Fluoro modified nucleoside
  modified_base order(1..3,9,11..12,15,17,26,29..30): mod_base = OTHER; note = 2-Prime-O-Methyl modified nucleoside
  modified_base order(1^2,11^12,14^15,19^20,29^30): mod_base = OTHER; note = (1,3-dimethylimidazolidin-2-ylidene) Phosphoramidate linkage
  modified_base order(2..6,8^9,10^11,13^14,17..19,22..25,27..29): mod_base = OTHER; note = Phosphorothioate linkage
  modified_base 25^26: mod_base = OTHER; note = Mesylphosphoramidate linkage
  misc_feature 1..30: note = RM107291

SEQ ID NO: 1219 - DNA, 30 bp, synthetic construct; identical to SEQ ID NO: 1197
  source 1..30: mol_type = other DNA
  misc_feature 24..25: note = DNA
  misc_feature order(1..23,26..30): note = RNA
  modified_base order(6,16,20..21): mod_base = OTHER; note = 2-Prime-O-Methoxyethyl modified nucleoside
  modified_base order(7,23): mod_base = OTHER; note = 2-Prime-O-Methoxyethyl modified 5-methyl Cytidine
  modified_base order(10,28): mod_base = OTHER; note = 2-Prime-O-Methoxyethyl modified 5-methyl Uridine
  modified_base 24: mod_base = OTHER; note = DNA nucleotide carrying a 6-amino-5-nitro-3-yl-2(1H)-pyridone nucleobase
  modified_base 25: mod_base = OTHER; note = DNA nucleotide carrying a hypoxanthine nucleobase
  modified_base order(4..5,8,13..14,18..19,22,27): mod_base = OTHER; note = 2-Prime-Fluoro modified nucleoside
  modified_base order(1..3,9,11..12,15,17,26,29..30): mod_base = OTHER; note = 2-Prime-O-Methyl modified nucleoside
  modified_base order(1^2,11^12,14^15,19^20,25^26,29^30): mod_base = OTHER; note = (1,3-dimethylimidazolidin-2-ylidene) Phosphoramidate linkage
  modified_base order(2..6,8^9,10^11,13^14,17..19,22^23,24^25,27..29): mod_base = OTHER; note = Phosphorothioate linkage
  misc_feature 1..30: note = RM107292

SEQ ID NO: 1220 - DNA, 30 bp, synthetic construct; identical to SEQ ID NO: 1197
  source 1..30: mol_type = other DNA
  misc_feature 24..25: note = DNA
  misc_feature order(1..23,26..30): note = RNA
  modified_base order(6,16,20..21): mod_base = OTHER; note = 2-Prime-O-Methoxyethyl modified nucleoside
  modified_base order(7,23): mod_base = OTHER; note = 2-Prime-O-Methoxyethyl modified 5-methyl Cytidine
  modified_base order(10,28): mod_base = OTHER; note = 2-Prime-O-Methoxyethyl modified 5-methyl Uridine
  modified_base 24: mod_base = OTHER; note = DNA nucleotide carrying a 6-amino-5-nitro-3-yl-2(1H)-pyridone nucleobase
  modified_base 25: mod_base = OTHER; note = DNA nucleotide carrying a hypoxanthine nucleobase
  modified_base order(4..5,8,13..14,18..19,22,27): mod_base = OTHER; note = 2-Prime-Fluoro modified nucleoside
  modified_base order(1..3,9,11..12,15,17,26,29..30): mod_base = OTHER; note = 2-Prime-O-Methyl modified nucleoside
  modified_base order(1^2,11^12,14^15,19^20,29^30): mod_base = OTHER; note = (1,3-dimethylimidazolidin-2-ylidene) Phosphoramidate linkage
  modified_base order(2..6,8^9,10^11,13^14,17..19,22^23,24^25,27..29): mod_base = OTHER; note = Phosphorothioate linkage
  modified_base 25^26: mod_base = OTHER; note = Mesylphosphoramidate linkage
  misc_feature 1..30: note = RM107293

SEQ ID NO: 1221 - DNA, 25 bp, synthetic construct
  source 1..25: mol_type = other DNA
  misc_feature 14..15: note = DNA
  misc_feature order(1..13,16..25): note = RNA
  modified_base 3: mod_base = OTHER; note = 2-Prime-O-Methoxyethyl modified nucleoside
  modified_base 13: mod_base = OTHER; note = 2-Prime-O-Methoxyethyl modified 5-methyl Cytidine
  modified_base order(1..2,18): mod_base = OTHER; note = 2-Prime-O-Methoxyethyl modified 5-methyl Uridine
  modified_base 14: mod_base = OTHER; note = DNA nucleotide carrying a 6-amino-5-nitro-3-yl-2(1H)-pyridone nucleobase
  modified_base 15: mod_base = OTHER; note = DNA nucleotide carrying a hypoxanthine nucleobase
  modified_base order(8,10,12,17,19,21,23): mod_base = OTHER; note = 2-Prime-Fluoro modified nucleoside
  modified_base order(4..7,9,11,16,20,22,24..25): mod_base = OTHER; note = 2-Prime-O-Methyl modified nucleoside
  modified_base order(4..13,14^15,17..25): mod_base = OTHER; note = Phosphorothioate linkage
  modified_base 15^16: mod_base = OTHER; note = Methylphosphonate linkage
  misc_feature 1..25: note = RM107294
ttggcatccagtcnncatgctgaca

SEQ ID NO: 1222 - DNA, 25 bp, synthetic construct
  source 1..25: mol_type = other DNA
  misc_feature 14..15: note = DNA
  misc_feature order(1..13,16..25): note = RNA
  modified_base 3: mod_base = OTHER; note = 2-Prime-O-Methoxyethyl modified nucleoside
  modified_base 13: mod_base = OTHER; note = 2-Prime-O-Methoxyethyl modified 5-methyl Cytidine
  modified_base order(1..2,18): mod_base = OTHER; note = 2-Prime-O-Methoxyethyl modified 5-methyl Uridine
  modified_base 14: mod_base = OTHER; note = DNA nucleotide carrying a 6-amino-5-nitro-3-yl-2(1H)-pyridone nucleobase
  modified_base 15: mod_base = OTHER; note = DNA nucleotide carrying a hypoxanthine nucleobase
  modified_base order(8,10,12,17,19,21,23): mod_base = OTHER; note = 2-Prime-Fluoro modified nucleoside
  modified_base order(4..7,9,11,16,20,22,24..25): mod_base = OTHER; note = 2-Prime-O-Methyl modified nucleoside
  modified_base order(1^2,24^25): mod_base = OTHER; note = (1,3-dimethylimidazolidin-2-ylidene) Phosphoramidate linkage
  modified_base order(4..13,14^15,17..24): mod_base = OTHER; note = Phosphorothioate linkage
  modified_base 15^16: mod_base = OTHER; note = Methylphosphonate linkage
  misc_feature 1..25: note = RM107295
ttggcatccagtcnncatgctgaca

SEQ ID NO: 1223 - DNA, 25 bp, synthetic construct
  source 1..25: mol_type = other DNA
  misc_feature 13..15: note = DNA
  misc_feature order(1..12,16..25): note = RNA
  modified_base 3: mod_base = OTHER; note = 2-Prime-O-Methoxyethyl modified nucleoside
  modified_base order(1..2,18): mod_base = OTHER; note = 2-Prime-O-Methoxyethyl modified 5-methyl Uridine
  modified_base 14: mod_base = OTHER; note = DNA nucleotide carrying a 6-amino-5-nitro-3-yl-2(1H)-pyridone nucleobase
  modified_base 15: mod_base = OTHER; note = DNA nucleotide carrying a hypoxanthine nucleobase
  modified_base order(8,10,12,17,19,21,23): mod_base = OTHER; note = 2-Prime-Fluoro modified nucleoside
  modified_base order(4..7,9,11,16,20,22,24..25): mod_base = OTHER; note = 2-Prime-O-Methyl modified nucleoside
  modified_base order(1^2,24^25): mod_base = OTHER; note = (1,3-dimethylimidazolidin-2-ylidene) Phosphoramidate linkage
  modified_base order(4..15,17..24): mod_base = OTHER; note = Phosphorothioate linkage
  modified_base 15^16: mod_base = OTHER; note = Methylphosphonate linkage
  misc_feature 1..25: note = RM107296
ttggcatccagtcnncatgctgaca

SEQ ID NO: 1224 - DNA, 25 bp, synthetic construct
  source 1..25: mol_type = other DNA
  misc_feature 13..15: note = DNA
  misc_feature order(1..12,16..25): note = RNA
  modified_base 3: mod_base = OTHER; note = 2-Prime-O-Methoxyethyl modified nucleoside
  modified_base order(1..2,18): mod_base = OTHER; note = 2-Prime-O-Methoxyethyl modified 5-methyl Uridine
  modified_base 14: mod_base = OTHER; note = DNA nucleotide carrying a 6-amino-5-nitro-3-yl-2(1H)-pyridone nucleobase
  modified_base 15: mod_base = OTHER; note = DNA nucleotide carrying a hypoxanthine nucleobase
  modified_base order(8,10,12,17,19,21,23): mod_base = OTHER; note = 2-Prime-Fluoro modified nucleoside
  modified_base order(4..7,9,11,16,20,22,24..25): mod_base = OTHER; note = 2-Prime-O-Methyl modified nucleoside
  modified_base order(1^2,24^25): mod_base = OTHER; note = (1,3-dimethylimidazolidin-2-ylidene) Phosphoramidate linkage
  modified_base order(4..15,17..24): mod_base = OTHER; note = Phosphorothioate linkage
  modified_base 15^16: mod_base = OTHER; note = Mesylphosphoramidate linkage
  misc_feature 1..25: note = RM107297
ttggcatccagtcnncatgctgaca

SEQ ID NO: 1225 - DNA, 25 bp, synthetic construct
  source 1..25: mol_type = other DNA
  misc_feature 14..15: note = DNA
  misc_feature order(1..13,16..25): note = RNA
  modified_base 3: mod_base = OTHER; note = 2-Prime-O-Methoxyethyl modified nucleoside
  modified_base 13: mod_base = OTHER; note = 2-Prime-O-Methoxyethyl modified 5-methyl Cytidine
  modified_base order(1..2,18): mod_base = OTHER; note = 2-Prime-O-Methoxyethyl modified 5-methyl Uridine
  modified_base 14: mod_base = OTHER; note = DNA nucleotide carrying a 6-amino-5-nitro-3-yl-2(1H)-pyridone nucleobase
  modified_base 15: mod_base = OTHER; note = DNA nucleotide carrying a hypoxanthine nucleobase
  modified_base order(8,10,12,17,19,21,23): mod_base = OTHER; note = 2-Prime-Fluoro modified nucleoside
  modified_base order(4..7,9,11,16,20,22,24..25): mod_base = OTHER; note = 2-Prime-O-Methyl modified nucleoside
  modified_base order(1^2,15^16,24^25): mod_base = OTHER; note = (1,3-dimethylimidazolidin-2-ylidene) Phosphoramidate linkage
  modified_base order(4..13,14^15,17..24): mod_base = OTHER; note = Phosphorothioate linkage
  misc_feature 1..25: note = RM107298
ttggcatccagtcnncatgctgaca

SEQ ID NO: 1226 - DNA, 25 bp, synthetic construct
  source 1..25: mol_type = other DNA
  misc_feature 14..15: note = DNA
  misc_feature order(1..13,16..25): note = RNA
  modified_base 3: mod_base = OTHER; note = 2-Prime-O-Methoxyethyl modified nucleoside
  modified_base 13: mod_base = OTHER; note = 2-Prime-O-Methoxyethyl modified 5-methyl Cytidine
  modified_base order(1..2,18): mod_base = OTHER; note = 2-Prime-O-Methoxyethyl modified 5-methyl Uridine
  modified_base 14: mod_base = OTHER; note = DNA nucleotide carrying a 6-amino-5-nitro-3-yl-2(1H)-pyridone nucleobase
  modified_base 15: mod_base = OTHER; note = DNA nucleotide carrying a hypoxanthine nucleobase
  modified_base order(8,10,12,17,19,21,23): mod_base = OTHER; note = 2-Prime-Fluoro modified nucleoside
  modified_base order(4..7,9,11,16,20,22,24..25): mod_base = OTHER; note = 2-Prime-O-Methyl modified nucleoside
  modified_base order(1^2,24^25): mod_base = OTHER; note = (1,3-dimethylimidazolidin-2-ylidene) Phosphoramidate linkage
  modified_base order(4..13,14^15,17..24): mod_base = OTHER; note = Phosphorothioate linkage
  modified_base 15^16: mod_base = OTHER; note = Mesylphosphoramidate linkage
  misc_feature 1..25: note = RM107299
ttggcatccagtcnncatgctgaca

SEQ ID NO: 1227 - DNA, 25 bp, synthetic construct
  source 1..25: mol_type = other DNA
  misc_feature 14..15: note = DNA
  misc_feature order(1..13,16..25): note = RNA
  modified_base 3: mod_base = OTHER; note = 2-Prime-O-Methoxyethyl modified nucleoside
  modified_base 13: mod_base = OTHER; note = 2-Prime-O-Methoxyethyl modified 5-methyl Cytidine
  modified_base order(1..2,18): mod_base = OTHER; note = 2-Prime-O-Methoxyethyl modified 5-methyl Uridine
  modified_base 14: mod_base = OTHER; note = DNA nucleotide carrying a 6-amino-5-nitro-3-yl-2(1H)-pyridone nucleobase
  modified_base 15: mod_base = OTHER; note = DNA nucleotide carrying a hypoxanthine nucleobase
  modified_base order(7,9,11,17,20,22,24): mod_base = OTHER; note = 2-Prime-Fluoro modified nucleoside
  modified_base order(4..6,8,10,12,16,19,21,23,25): mod_base = OTHER; note = 2-Prime-O-Methyl modified nucleoside
  modified_base order(1^2,24^25): mod_base = OTHER; note = (1,3-dimethylimidazolidin-2-ylidene) Phosphoramidate linkage
  modified_base order(4..13,14^15,17..24): mod_base = OTHER; note = Phosphorothioate linkage
  modified_base 15^16: mod_base = OTHER; note = Methylphosphonate linkage
  misc_feature 1..25: note = RM107300
ttggcatccagtcnncatgctgaca

SEQ ID NO: 1228 - DNA, 25 bp, synthetic construct
  source 1..25: mol_type = other DNA
  misc_feature 13..15: note = DNA
  misc_feature order(1..12,16..25): note = RNA
  modified_base 3: mod_base = OTHER; note = 2-Prime-O-Methoxyethyl modified nucleoside
  modified_base order(1..2,18): mod_base = OTHER; note = 2-Prime-O-Methoxyethyl modified 5-methyl Uridine
  modified_base 14: mod_base = OTHER; note = DNA nucleotide carrying a 6-amino-5-nitro-3-yl-2(1H)-pyridone nucleobase
  modified_base 15: mod_base = OTHER; note = DNA nucleotide carrying a hypoxanthine nucleobase
  modified_base order(7,9,11,17,20,22,24): mod_base = OTHER; note = 2-Prime-Fluoro modified nucleoside
  modified_base order(4..6,8,10,12,16,19,21,23,25): mod_base = OTHER; note = 2-Prime-O-Methyl modified nucleoside
  modified_base order(1^2,24^25): mod_base = OTHER; note = (1,3-dimethylimidazolidin-2-ylidene) Phosphoramidate linkage
  modified_base order(4..15,17..24): mod_base = OTHER; note = Phosphorothioate linkage
  modified_base 15^16: mod_base = OTHER; note = Methylphosphonate linkage
  misc_feature 1..25: note = RM107301
ttggcatccagtcnncatgctgaca

SEQ ID NO: 1229 - DNA, 25 bp, synthetic construct
  source 1..25: mol_type = other DNA
  misc_feature 13..15: note = DNA
  misc_feature order(1..12,16..25): note = RNA
  modified_base 3: mod_base = OTHER; note = 2-Prime-O-Methoxyethyl modified nucleoside
  modified_base order(1..2,18): mod_base = OTHER; note = 2-Prime-O-Methoxyethyl modified 5-methyl Uridine
  modified_base 14: mod_base = OTHER; note = DNA nucleotide carrying a 6-amino-5-nitro-3-yl-2(1H)-pyridone nucleobase
  modified_base 15: mod_base = OTHER; note = DNA nucleotide carrying a hypoxanthine nucleobase
  modified_base order(7,9,11,17,20,22,24): mod_base = OTHER; note = 2-Prime-Fluoro modified nucleoside
  modified_base order(4..6,8,10,12,16,19,21,23,25): mod_base = OTHER; note = 2-Prime-O-Methyl modified nucleoside
  modified_base order(1^2,24^25): mod_base = OTHER; note = (1,3-dimethylimidazolidin-2-ylidene) Phosphoramidate linkage
  modified_base order(4..15,17..24): mod_base = OTHER; note = Phosphorothioate linkage
  modified_base 15^16: mod_base = OTHER; note = Mesylphosphoramidate linkage
  misc_feature 1..25: note = RM107302
ttggcatccagtcnncatgctgaca

SEQ ID NO: 1230 - DNA, 25 bp, synthetic construct
  source 1..25: mol_type = other DNA
  misc_feature 14..15: note = DNA
  misc_feature order(1..13,16..25): note = RNA
  modified_base 3: mod_base = OTHER; note = 2-Prime-O-Methoxyethyl modified nucleoside
  modified_base 13: mod_base = OTHER; note = 2-Prime-O-Methoxyethyl modified 5-methyl Cytidine
  modified_base order(1..2,18): mod_base = OTHER; note = 2-Prime-O-Methoxyethyl modified 5-methyl Uridine
  modified_base 14: mod_base = OTHER; note = DNA nucleotide carrying a 6-amino-5-nitro-3-yl-2(1H)-pyridone nucleobase
  modified_base 15: mod_base = OTHER; note = DNA nucleotide carrying a hypoxanthine nucleobase
  modified_base order(7,9,11,17,20,22,24): mod_base = OTHER; note = 2-Prime-Fluoro modified nucleoside
  modified_base order(4..6,8,10,12,16,19,21,23,25): mod_base = OTHER; note = 2-Prime-O-Methyl modified nucleoside
  modified_base order(1^2,15^16,24^25): mod_base = OTHER; note = (1,3-dimethylimidazolidin-2-ylidene) Phosphoramidate linkage
  modified_base order(4..13,14^15,17..24): mod_base = OTHER; note = Phosphorothioate linkage
  misc_feature 1..25: note = RM107303
ttggcatccagtcnncatgctgaca

SEQ ID NO: 1231 - DNA, 25 bp, synthetic construct
  source 1..25: mol_type = other DNA
  misc_feature 14..15: note = DNA
  misc_feature order(1..13,16..25): note = RNA
  modified_base 3: mod_base = OTHER; note = 2-Prime-O-Methoxyethyl modified nucleoside
  modified_base 13: mod_base = OTHER; note = 2-Prime-O-Methoxyethyl modified 5-methyl Cytidine
  modified_base order(1..2,18): mod_base = OTHER; note = 2-Prime-O-Methoxyethyl modified 5-methyl Uridine
  modified_base 14: mod_base = OTHER; note = DNA nucleotide carrying a 6-amino-5-nitro-3-yl-2(1H)-pyridone nucleobase
  modified_base 15: mod_base = OTHER; note = DNA nucleotide carrying a hypoxanthine nucleobase
  modified_base order(7,9,11,17,20,22,24): mod_base = OTHER; note = 2-Prime-Fluoro modified nucleoside
  modified_base order(4..6,8,10,12,16,19,21,23,25): mod_base = OTHER; note = 2-Prime-O-Methyl modified nucleoside
  modified_base order(1^2,24^25): mod_base = OTHER; note = (1,3-dimethylimidazolidin-2-ylidene) Phosphoramidate linkage
  modified_base order(4..13,14^15,17..24): mod_base = OTHER; note = Phosphorothioate linkage
  modified_base 15^16: mod_base = OTHER; note = Mesylphosphoramidate linkage
  misc_feature 1..25: note = RM107304
ttggcatccagtcnncatgctgaca

SEQ ID NO: 1232 - DNA, 25 bp, synthetic construct
  source 1..25: mol_type = other DNA
  misc_feature 14..15: note = DNA
  misc_feature order(1..13,16..25): note = RNA
  modified_base 3: mod_base = OTHER; note = 2-Prime-O-Methoxyethyl modified nucleoside
  modified_base 13: mod_base = OTHER; note = 2-Prime-O-Methoxyethyl modified 5-methyl Cytidine
  modified_base order(1..2,18): mod_base = OTHER; note = 2-Prime-O-Methoxyethyl modified 5-methyl Uridine
  modified_base 14: mod_base = OTHER; note = DNA nucleotide carrying a 6-amino-5-nitro-3-yl-2(1H)-pyridone nucleobase
  modified_base 15: mod_base = OTHER; note = DNA nucleotide carrying a hypoxanthine nucleobase
  modified_base order(7,9,11,17,20,22,24): mod_base = OTHER; note = 2-Prime-Fluoro modified nucleoside
  modified_base order(4..6,8,10,12,16,19,21,23,25): mod_base = OTHER; note = 2-Prime-O-Methyl modified nucleoside
  modified_base order(1^2,21^22,24^25): mod_base = OTHER; note = (1,3-dimethylimidazolidin-2-ylidene) Phosphoramidate linkage
  modified_base order(4..13,14^15,17..21,22..24): mod_base = OTHER; note = Phosphorothioate linkage
  modified_base 15^16: mod_base = OTHER; note = Methylphosphonate linkage
  misc_feature 1..25: note = RM107305
ttggcatccagtcnncatgctgaca

SEQ ID NO: 1233 - DNA, 25 bp, synthetic construct
  source 1..25: mol_type = other DNA
  misc_feature 13..15: note = DNA
  misc_feature order(1..12,16..25): note = RNA
  modified_base 3: mod_base = OTHER; note = 2-Prime-O-Methoxyethyl modified nucleoside
  modified_base order(1..2,18): mod_base = OTHER; note = 2-Prime-O-Methoxyethyl modified 5-methyl Uridine
  modified_base 14: mod_base = OTHER; note = DNA nucleotide carrying a 6-amino-5-nitro-3-yl-2(1H)-pyridone nucleobase
  modified_base 15: mod_base = OTHER; note = DNA nucleotide carrying a hypoxanthine nucleobase
  modified_base order(7,9,11,17,20,22,24): mod_base = OTHER; note = 2-Prime-Fluoro modified nucleoside
  modified_base order(4..6,8,10,12,16,19,21,23,25): mod_base = OTHER; note = 2-Prime-O-Methyl modified nucleoside
  modified_base order(1^2,21^22,24^25): mod_base = OTHER; note = (1,3-dimethylimidazolidin-2-ylidene) Phosphoramidate linkage
  modified_base order(4..15,17..21,22..24): mod_base = OTHER; note = Phosphorothioate linkage
  modified_base 15^16: mod_base = OTHER; note = Methylphosphonate linkage
  misc_feature 1..25: note = RM107306
ttggcatccagtcnncatgctgaca

SEQ ID NO: 1234 - DNA, 25 bp, synthetic construct
  source 1..25: mol_type = other DNA
  misc_feature 13..15: note = DNA
  misc_feature order(1..12,16..25): note = RNA
  modified_base 3: mod_base = OTHER; note = 2-Prime-O-Methoxyethyl modified nucleoside
  modified_base order(1..2,18): mod_base = OTHER; note = 2-Prime-O-Methoxyethyl modified 5-methyl Uridine
  modified_base 14: mod_base = OTHER; note = DNA nucleotide carrying a 6-amino-5-nitro-3-yl-2(1H)-pyridone nucleobase
  modified_base 15: mod_base = OTHER; note = DNA nucleotide carrying a hypoxanthine nucleobase
  modified_base order(7,9,11,17,20,22,24): mod_base = OTHER; note = 2-Prime-Fluoro modified nucleoside
  modified_base order(4..6,8,10,12,16,19,21,23,25): mod_base = OTHER; note = 2-Prime-O-Methyl modified nucleoside
  modified_base order(1^2,21^22,24^25): mod_base = OTHER; note = (1,3-dimethylimidazolidin-2-ylidene) Phosphoramidate linkage
  modified_base order(4..15,17..21,22..24): mod_base = OTHER; note = Phosphorothioate linkage
  modified_base 15^16: mod_base = OTHER; note = Mesylphosphoramidate linkage
  misc_feature 1..25: note = RM107307
ttggcatccagtcnncatgctgaca

SEQ ID NO: 1235 - DNA, 25 bp, synthetic construct
  source 1..25: mol_type = other DNA
  misc_feature 14..15: note = DNA
  misc_feature order(1..13,16..25): note = RNA
  modified_base 3: mod_base = OTHER; note = 2-Prime-O-Methoxyethyl modified nucleoside
  modified_base 13: mod_base = OTHER; note = 2-Prime-O-Methoxyethyl modified 5-methyl Cytidine
  modified_base order(1..2,18): mod_base = OTHER; note = 2-Prime-O-Methoxyethyl modified 5-methyl Uridine
  modified_base 14: mod_base = OTHER; note = DNA nucleotide carrying a 6-amino-5-nitro-3-yl-2(1H)-pyridone nucleobase
  modified_base 15: mod_base = OTHER; note = DNA nucleotide carrying a hypoxanthine nucleobase
  modified_base order(7,9,11,17,20,22,24): mod_base = OTHER; note = 2-Prime-Fluoro modified nucleoside
  modified_base order(4..6,8,10,12,16,19,21,23,25): mod_base = OTHER; note = 2-Prime-O-Methyl modified nucleoside
  modified_base order(1^2,15^16,21^22,24^25): mod_base = OTHER; note = (1,3-dimethylimidazolidin-2-ylidene) Phosphoramidate linkage
  modified_base order(4..13,14^15,17..21,22..24): mod_base = OTHER; note = Phosphorothioate linkage
  misc_feature 1..25: note = RM107308
ttggcatccagtcnncatgctgaca

SEQ ID NO: 1236 - DNA, 25 bp, synthetic construct
  source 1..25: mol_type = other DNA
  misc_feature 14..15: note = DNA
  misc_feature order(1..13,16..25): note = RNA
  modified_base 3: mod_base = OTHER; note = 2-Prime-O-Methoxyethyl modified nucleoside
  modified_base 13: mod_base = OTHER; note = 2-Prime-O-Methoxyethyl modified 5-methyl Cytidine
  modified_base order(1..2,18): mod_base = OTHER; note = 2-Prime-O-Methoxyethyl modified 5-methyl Uridine
  modified_base 14: mod_base = OTHER; note = DNA nucleotide carrying a 6-amino-5-nitro-3-yl-2(1H)-pyridone nucleobase
  modified_base 15: mod_base = OTHER; note = DNA nucleotide carrying a hypoxanthine nucleobase
  modified_base order(7,9,11,17,20,22,24): mod_base = OTHER; note = 2-Prime-Fluoro modified nucleoside
  modified_base order(4..6,8,10,12,16,19,21,23,25): mod_base = OTHER; note = 2-Prime-O-Methyl modified nucleoside
  modified_base order(1^2,21^22,24^25): mod_base = OTHER; note = (1,3-dimethylimidazolidin-2-ylidene) Phosphoramidate linkage
  modified_base order(4..13,14^15,17..21,22..24): mod_base = OTHER; note = Phosphorothioate linkage
  modified_base 15^16: mod_base = OTHER; note = Mesylphosphoramidate linkage
  misc_feature 1..25: note = RM107309
ttggcatccagtcnncatgctgaca

SEQ ID NO: 1237 - DNA, 25 bp, synthetic construct
  source 1..25: mol_type = other DNA
  misc_feature 13..15: note = DNA
  misc_feature order(1..12,16..25): note = RNA
  modified_base 3: mod_base = OTHER; note = 2-Prime-O-Methoxyethyl modified nucleoside
  modified_base order(1..2,18): mod_base = OTHER; note = 2-Prime-O-Methoxyethyl modified 5-methyl Uridine
  modified_base 14: mod_base = OTHER; note = DNA nucleotide carrying a 6-amino-5-nitro-3-yl-2(1H)-pyridone nucleobase
  modified_base 15: mod_base = OTHER; note = DNA nucleotide carrying a hypoxanthine nucleobase
  modified_base order(7,9,11,17,20,22,24): mod_base = OTHER; note = 2-Prime-Fluoro modified nucleoside
  modified_base order(4..6,8,10,12,16,19,21,23,25): mod_base = OTHER; note = 2-Prime-O-Methyl modified nucleoside
  modified_base order(1^2,15^16,21^22,24^25): mod_base = OTHER; note = (1,3-dimethylimidazolidin-2-ylidene) Phosphoramidate linkage
  modified_base order(4..15,17..21,22..24): mod_base = OTHER; note = Phosphorothioate linkage
  misc_feature 1..25: note = RM107310
ttggcatccagtcnncatgctgaca

SEQ ID NO: 1238 - DNA, 25 bp, synthetic construct
  source 1..25: mol_type = other DNA
  misc_feature 14..15: note = DNA
  misc_feature order(1..13,16..25): note = RNA
  modified_base 3: mod_base = OTHER; note = 2-Prime-O-Methoxyethyl modified nucleoside
  modified_base 13: mod_base = OTHER; note = 2-Prime-O-Methoxyethyl modified 5-methyl Cytidine
  modified_base 18: mod_base = OTHER; note = 2-Prime-O-Methoxyethyl modified 5-methyl Uridine
  modified_base 14: mod_base = OTHER; note = DNA nucleotide carrying a 6-amino-5-nitro-3-yl-2(1H)-pyridone nucleobase
  modified_base 15: mod_base = OTHER; note = DNA nucleotide carrying a hypoxanthine nucleobase
  modified_base order(1..2,7,9,11,17,20,22,24): mod_base = OTHER; note = 2-Prime-Fluoro modified nucleoside
  modified_base order(4..6,8,10,12,16,19,21,23,25): mod_base = OTHER; note = 2-Prime-O-Methyl modified nucleoside
  modified_base order(1^2,24^25): mod_base = OTHER; note = (1,3-dimethylimidazolidin-2-ylidene) Phosphoramidate linkage
  modified_base order(2^3,4..13,14^15,17..24): mod_base = OTHER; note = Phosphorothioate linkage
  modified_base 15^16: mod_base = OTHER; note = Methylphosphonate linkage
  misc_feature 1..25: note = RM107311
ttggcatccagtcnncatgctgaca

SEQ ID NO: 1239 - DNA, 25 bp, synthetic construct
  source 1..25: mol_type = other DNA
  misc_feature 13..15: note = DNA
  misc_feature order(1..12,16..25): note = RNA
  modified_base 3: mod_base = OTHER; note = 2-Prime-O-Methoxyethyl modified nucleoside
  modified_base 18: mod_base = OTHER; note = 2-Prime-O-Methoxyethyl modified 5-methyl Uridine
  modified_base 14: mod_base = OTHER; note = DNA nucleotide carrying a 6-amino-5-nitro-3-yl-2(1H)-pyridone nucleobase
  modified_base 15: mod_base = OTHER; note = DNA nucleotide carrying a hypoxanthine nucleobase
  modified_base order(1..2,7,9,11,17,20,22,24): mod_base = OTHER; note = 2-Prime-Fluoro modified nucleoside
  modified_base order(4..6,8,10,12,16,19,21,23,25): mod_base = OTHER; note = 2-Prime-O-Methyl modified nucleoside
  modified_base order(1^2,24^25): mod_base = OTHER; note = (1,3-dimethylimidazolidin-2-ylidene) Phosphoramidate linkage
  modified_base order(2^3,4..15,17..24): mod_base = OTHER; note = Phosphorothioate linkage
  modified_base 15^16: mod_base = OTHER; note = Methylphosphonate linkage
  misc_feature 1..25: note = RM107312
ttggcatccagtcnncatgctgaca

SEQ ID NO: 1240 - DNA, 25 bp, synthetic construct
  source 1..25: mol_type = other DNA
  misc_feature 13..15: note = DNA
  misc_feature order(1..12,16..25): note = RNA
  modified_base 3: mod_base = OTHER; note = 2-Prime-O-Methoxyethyl modified nucleoside
  modified_base 18: mod_base = OTHER; note = 2-Prime-O-Methoxyethyl modified 5-methyl Uridine
  modified_base 14: mod_base = OTHER; note = DNA nucleotide carrying a 6-amino-5-nitro-3-yl-2(1H)-pyridone nucleobase
  modified_base 15: mod_base = OTHER; note = DNA nucleotide carrying a hypoxanthine nucleobase
  modified_base order(1..2,7,9,11,17,20,22,24): mod_base = OTHER; note = 2-Prime-Fluoro modified nucleoside
  modified_base order(4..6,8,10,12,16,19,21,23,25): mod_base = OTHER; note = 2-Prime-O-Methyl modified nucleoside
  modified_base order(1^2,24^25): mod_base = OTHER; note = (1,3-dimethylimidazolidin-2-ylidene) Phosphoramidate linkage
  modified_base order(2^3,4..15,17..24): mod_base = OTHER; note = Phosphorothioate linkage
  modified_base 15^16: mod_base = OTHER; note = Mesylphosphoramidate linkage
  misc_feature 1..25: note = RM107313
ttggcatccagtcnncatgctgaca

SEQ ID NO: 1241 - DNA, 25 bp, synthetic construct
  source 1..25: mol_type = other DNA
  misc_feature 14..15: note = DNA
  misc_feature order(1..13,16..25): note = RNA
  modified_base 3: mod_base = OTHER; note = 2-Prime-O-Methoxyethyl modified nucleoside
  modified_base 13: mod_base = OTHER; note = 2-Prime-O-Methoxyethyl modified 5-methyl Cytidine
  modified_base 18: mod_base = OTHER; note = 2-Prime-O-Methoxyethyl modified 5-methyl Uridine
  modified_base 14: mod_base = OTHER; note = DNA nucleotide carrying a 6-amino-5-nitro-3-yl-2(1H)-pyridone nucleobase
  modified_base 15: mod_base = OTHER; note = DNA nucleotide carrying a hypoxanthine nucleobase
  modified_base order(1..2,7,9,11,17,20,22,24): mod_base = OTHER; note = 2-Prime-Fluoro modified nucleoside
  modified_base order(4..6,8,10,12,16,19,21,23,25): mod_base = OTHER; note = 2-Prime-O-Methyl modified nucleoside
  modified_base order(1^2,15^16,24^25): mod_base = OTHER; note = (1,3-dimethylimidazolidin-2-ylidene) Phosphoramidate linkage
  modified_base order(2^3,4..13,14^15,17..24): mod_base = OTHER; note = Phosphorothioate linkage
  misc_feature 1..25: note = RM107314
ttggcatccagtcnncatgctgaca

SEQ ID NO: 1242 - DNA, 25 bp, synthetic construct
  source 1..25: mol_type = other DNA
  misc_feature 14..15: note = DNA
  misc_feature order(1..13,16..25): note = RNA
  modified_base 3: mod_base = OTHER; note = 2-Prime-O-Methoxyethyl modified nucleoside
  modified_base 13: mod_base = OTHER; note = 2-Prime-O-Methoxyethyl modified 5-methyl Cytidine
  modified_base 18: mod_base = OTHER; note = 2-Prime-O-Methoxyethyl modified 5-methyl Uridine
  modified_base 14: mod_base = OTHER; note = DNA nucleotide carrying a 6-amino-5-nitro-3-yl-2(1H)-pyridone nucleobase
  modified_base 15: mod_base = OTHER; note = DNA nucleotide carrying a hypoxanthine nucleobase
  modified_base order(1..2,7,9,11,17,20,22,24): mod_base = OTHER; note = 2-Prime-Fluoro modified nucleoside
  modified_base order(4..6,8,10,12,16,19,21,23,25): mod_base = OTHER; note = 2-Prime-O-Methyl modified nucleoside
  modified_base order(1^2,24^25): mod_base = OTHER; note = (1,3-dimethylimidazolidin-2-ylidene) Phosphoramidate linkage
  modified_base order(2^3,4..13,14^15,17..24): mod_base = OTHER; note = Phosphorothioate linkage
  modified_base 15^16: mod_base = OTHER; note = Mesylphosphoramidate linkage
  misc_feature 1..25: note = RM107315
ttggcatccagtcnncatgctgaca

SEQ ID NO: 1243 - DNA, 25 bp, synthetic construct
  source 1..25: mol_type = other DNA
  misc_feature 14..15: note = DNA
  misc_feature order(1..13,16..25): note = RNA
  modified_base 3: mod_base = OTHER; note = 2-Prime-O-Methoxyethyl modified nucleoside
  modified_base 13: mod_base = OTHER; note = 2-Prime-O-Methoxyethyl modified 5-methyl Cytidine
  modified_base 18: mod_base = OTHER; note = 2-Prime-O-Methoxyethyl modified 5-methyl Uridine
  modified_base 14: mod_base = OTHER; note = DNA nucleotide carrying a 6-amino-5-nitro-3-yl-2(1H)-pyridone nucleobase
  modified_base 15: mod_base = OTHER; note = DNA nucleotide carrying a hypoxanthine nucleobase
  modified_base order(1..2,7,9,11,17,20,22,24): mod_base = OTHER; note = 2-Prime-Fluoro modified nucleoside
  modified_base order(4..6,8,10,12,16,19,21,23,25): mod_base = OTHER; note = 2-Prime-O-Methyl modified nucleoside
  modified_base order(1^2,21^22,24^25): mod_base = OTHER; note = (1,3-dimethylimidazolidin-2-ylidene) Phosphoramidate linkage
  modified_base order(2^3,4..13,14^15,17..21,22..24): mod_base = OTHER; note = Phosphorothioate linkage
  modified_base 15^16: mod_base = OTHER; note = Methylphosphonate linkage
  misc_feature 1..25: note = RM107316
ttggcatccagtcnncatgctgaca

SEQ ID NO: 1244 - DNA, 25 bp, synthetic construct
  source 1..25: mol_type = other DNA
  misc_feature 13..15: note = DNA
  misc_feature order(1..12,16..25): note = RNA
  modified_base 3: mod_base = OTHER; note = 2-Prime-O-Methoxyethyl modified nucleoside
  modified_base 18: mod_base = OTHER; note = 2-Prime-O-Methoxyethyl modified 5-methyl Uridine
  modified_base 14: mod_base = OTHER; note = DNA nucleotide carrying a 6-amino-5-nitro-3-yl-2(1H)-pyridone nucleobase
  modified_base 15: mod_base = OTHER; note = DNA nucleotide carrying a hypoxanthine nucleobase
  modified_base order(1..2,7,9,11,17,20,22,24): mod_base = OTHER; note = 2-Prime-Fluoro modified nucleoside
  modified_base order(4..6,8,10,12,16,19,21,23,25): mod_base = OTHER; note = 2-Prime-O-Methyl modified nucleoside
  modified_base order(1^2,21^22,24^25): mod_base = OTHER; note = (1,3-dimethylimidazolidin-2-ylidene) Phosphoramidate linkage
  modified_base order(2^3,4..15,17..21,22..24): mod_base = OTHER; note = Phosphorothioate linkage
  modified_base 15^16: mod_base = OTHER; note = Methylphosphonate linkage
  misc_feature 1..25: note = RM107317
ttggcatccagtcnncatgctgaca

SEQ ID NO: 1245 - DNA, 25 bp, synthetic construct
  source 1..25: mol_type = other DNA
  misc_feature 13..15: note = DNA
  misc_feature order(1..12,16..25): note = RNA
  modified_base 3: mod_base = OTHER; note = 2-Prime-O-Methoxyethyl modified nucleoside
  modified_base 18: mod_base = OTHER; note = 2-Prime-O-Methoxyethyl modified 5-methyl Uridine
  modified_base 14: mod_base = OTHER; note = DNA nucleotide carrying a 6-amino-5-nitro-3-yl-2(1H)-pyridone nucleobase
  modified_base 15: mod_base = OTHER; note = DNA nucleotide carrying a hypoxanthine nucleobase
  modified_base order(1..2,7,9,11,17,20,22,24): mod_base = OTHER; note = 2-Prime-Fluoro modified nucleoside
  modified_base order(4..6,8,10,12,16,19,21,23,25): mod_base = OTHER; note = 2-Prime-O-Methyl modified nucleoside
  modified_base order(1^2,21^22,24^25): mod_base = OTHER; note = (1,3-dimethylimidazolidin-2-ylidene) Phosphoramidate linkage
  modified_base order(2^3,4..15,17..21,22..24): mod_base = OTHER; note = Phosphorothioate linkage
  modified_base 15^16: mod_base = OTHER; note = Mesylphosphoramidate linkage
  misc_feature 1..25: note = RM107318
ttggcatccagtcnncatgctgaca

SEQ ID NO: 1246 - DNA, 25 bp, synthetic construct
  source 1..25: mol_type = other DNA
  misc_feature 14..15: note = DNA
  misc_feature order(1..13,16..25): note = RNA
  modified_base 3: mod_base = OTHER; note = 2-Prime-O-Methoxyethyl modified nucleoside
  modified_base 13: mod_base = OTHER; note = 2-Prime-O-Methoxyethyl modified 5-methyl Cytidine
  modified_base 18: mod_base = OTHER; note = 2-Prime-O-Methoxyethyl modified 5-methyl Uridine
  modified_base 14: mod_base = OTHER; note = DNA nucleotide carrying a 6-amino-5-nitro-3-yl-2(1H)-pyridone nucleobase
  modified_base 15: mod_base = OTHER; note = DNA nucleotide carrying a hypoxanthine nucleobase
  modified_base order(1..2,7,9,11,17,20,22,24): mod_base = OTHER; note = 2-Prime-Fluoro modified nucleoside
  modified_base order(4..6,8,10,12,16,19,21,23,25): mod_base = OTHER; note = 2-Prime-O-Methyl modified nucleoside
  modified_base order(1^2,15^16,21^22,24^25): mod_base = OTHER; note = (1,3-dimethylimidazolidin-2-ylidene) Phosphoramidate linkage
  modified_base order(2^3,4..13,14^15,17..21,22..24): mod_base = OTHER; note = Phosphorothioate linkage
  misc_feature 1..25: note = RM107319
ttggcatccagtcnncatgctgaca

SEQ ID NO: 1247 - DNA, 25 bp, synthetic construct
  source 1..25: mol_type = other DNA
  misc_feature 14..15: note = DNA
  misc_feature order(1..13,16..25): note = RNA
  modified_base 3: mod_base = OTHER; note = 2-Prime-O-Methoxyethyl modified nucleoside
  modified_base 13: mod_base = OTHER; note = 2-Prime-O-Methoxyethyl modified 5-methyl Cytidine
  modified_base 18: mod_base = OTHER; note = 2-Prime-O-Methoxyethyl modified 5-methyl Uridine
  modified_base 14: mod_base = OTHER; note = DNA nucleotide carrying a 6-amino-5-nitro-3-yl-2(1H)-pyridone nucleobase
  modified_base 15: mod_base = OTHER; note = DNA nucleotide carrying a hypoxanthine nucleobase
  modified_base order(1..2,7,9,11,17,20,22,24): mod_base = OTHER; note = 2-Prime-Fluoro modified nucleoside
  modified_base order(4..6,8,10,12,16,19,21,23,25): mod_base = OTHER; note = 2-Prime-O-Methyl modified nucleoside
  modified_base order(1^2,21^22,24^25): mod_base = OTHER; note = (1,3-dimethylimidazolidin-2-ylidene) Phosphoramidate linkage
  modified_base order(2^3,4..13,14^15,17..21,22..24): mod_base = OTHER; note = Phosphorothioate linkage
  modified_base 15^16: mod_base = OTHER; note = Mesylphosphoramidate linkage
  misc_feature 1..25: note = RM107320
ttggcatccagtcnncatgctgaca

SEQ ID NO: 1248 - DNA, 25 bp, synthetic construct
  source 1..25: mol_type = other DNA
  misc_feature 14..15: note = DNA
  misc_feature order(1..13,16..25): note = RNA
  modified_base 13: mod_base = OTHER; note = 2-Prime-O-Methoxyethyl modified 5-methyl Cytidine
  modified_base 18: mod_base = OTHER; note = 2-Prime-O-Methoxyethyl modified 5-methyl Uridine
  modified_base 14: mod_base = OTHER; note = DNA nucleotide carrying a 6-amino-5-nitro-3-yl-2(1H)-pyridone nucleobase
  modified_base 15: mod_base = OTHER; note = DNA nucleotide carrying a hypoxanthine nucleobase
  modified_base order(1..5,7,9,17): mod_base = OTHER; note = 2-Prime-Fluoro modified nucleoside
  modified_base order(6,8,10..12,16,19..25): mod_base = OTHER; note = 2-Prime-O-Methyl modified nucleoside
  modified_base order(1^2,24^25): mod_base = OTHER; note = (1,3-dimethylimidazolidin-2-ylidene) Phosphoramidate linkage
  modified_base order(2^3,4..13,14^15,17..24): mod_base = OTHER; note = Phosphorothioate linkage
  modified_base 15^16: mod_base = OTHER; note = Methylphosphonate linkage
  misc_feature 1..25: note = RM107321
ttggcatccagtcnncatgctgaca

SEQ ID NO: 1249 - DNA, 25 bp, synthetic construct
  source 1..25: mol_type = other DNA
  misc_feature 13..15: note = DNA
  misc_feature order(1..12,16..25): note = RNA
  modified_base 18: mod_base = OTHER; note = 2-Prime-O-Methoxyethyl modified 5-methyl Uridine
  modified_base 14: mod_base = OTHER; note = DNA nucleotide carrying a 6-amino-5-nitro-3-yl-2(1H)-pyridone nucleobase
  modified_base 15: mod_base = OTHER; note = DNA nucleotide carrying a hypoxanthine nucleobase
  modified_base order(1..5,7,9,17): mod_base = OTHER; note = 2-Prime-Fluoro modified nucleoside
  modified_base order(6,8,10..12,16,19..25): mod_base = OTHER; note = 2-Prime-O-Methyl modified nucleoside
  modified_base order(1^2,24^25): mod_base = OTHER; note = (1,3-dimethylimidazolidin-2-ylidene) Phosphoramidate linkage
  modified_base order(2^3,4..15,17..24): mod_base = OTHER; note = Phosphorothioate linkage
  modified_base 15^16: mod_base = OTHER; note = Methylphosphonate linkage
  misc_feature 1..25: note = RM107322
ttggcatccagtcnncatgctgaca

SEQ ID NO: 1250 - DNA, 25 bp, synthetic construct
  source 1..25: mol_type = other DNA
  misc_feature 13..15: note = DNA
  misc_feature order(1..12,16..25): note = RNA
  modified_base 18: mod_base = OTHER; note = 2-Prime-O-Methoxyethyl modified 5-methyl Uridine
  modified_base 14: mod_base = OTHER; note = DNA nucleotide carrying a 6-amino-5-nitro-3-yl-2(1H)-pyridone nucleobase
  modified_base 15: mod_base = OTHER; note = DNA nucleotide carrying a hypoxanthine nucleobase
  modified_base order(1..5,7,9,17): mod_base = OTHER; note = 2-Prime-Fluoro modified nucleoside
  modified_base order(6,8,10..12,16,19..25): mod_base = OTHER; note = 2-Prime-O-Methyl modified nucleoside
  modified_base order(1^2,24^25): mod_base = OTHER; note = (1,3-dimethylimidazolidin-2-ylidene) Phosphoramidate linkage
  modified_base order(2^3,4..15,17..24): mod_base = OTHER; note = Phosphorothioate linkage
  modified_base 15^16: mod_base = OTHER; note = Mesylphosphoramidate linkage
  misc_feature 1..25: note = RM107323
ttggcatccagtcnncatgctgaca

SEQ ID NO: 1251 - DNA, 25 bp, synthetic construct
  source 1..25: mol_type = other DNA
  misc_feature 14..15: note = DNA
  misc_feature order(1..13,16..25): note = RNA
  modified_base 13: mod_base = OTHER; note = 2-Prime-O-Methoxyethyl modified 5-methyl Cytidine
  modified_base 18: mod_base = OTHER; note = 2-Prime-O-Methoxyethyl modified 5-methyl Uridine
  modified_base 14: mod_base = OTHER; note = DNA nucleotide carrying a 6-amino-5-nitro-3-yl-2(1H)-pyridone nucleobase
  modified_base 15: mod_base = OTHER; note = DNA nucleotide carrying a hypoxanthine nucleobase
  modified_base order(1..5,7,9,17): mod_base = OTHER; note = 2-Prime-Fluoro modified nucleoside
  modified_base order(6,8,10..12,16,19..25): mod_base = OTHER; note = 2-Prime-O-Methyl modified nucleoside
  modified_base order(1^2,15^16,24^25): mod_base = OTHER; note = (1,3-dimethylimidazolidin-2-ylidene) Phosphoramidate linkage
  modified_base order(2^3,4..13,14^15,17..24): mod_base = OTHER; note = Phosphorothioate linkage
  misc_feature 1..25: note = RM107324
ttggcatccagtcnncatgctgaca

SEQ ID NO: 1252 - DNA, 25 bp, synthetic construct
  source 1..25: mol_type = other DNA
  misc_feature 14..15: note = DNA
  misc_feature order(1..13,16..25): note = RNA
  modified_base 13: mod_base = OTHER; note = 2-Prime-O-Methoxyethyl modified 5-methyl Cytidine
  modified_base 18: mod_base = OTHER; note = 2-Prime-O-Methoxyethyl modified 5-methyl Uridine
  modified_base 14: mod_base = OTHER; note = DNA nucleotide carrying a 6-amino-5-nitro-3-yl-2(1H)-pyridone nucleobase
  modified_base 15: mod_base = OTHER; note = DNA nucleotide carrying a hypoxanthine nucleobase
  modified_base order(1..5,7,9,17): mod_base = OTHER; note = 2-Prime-Fluoro modified nucleoside
  modified_base order(6,8,10..12,16,19..25): mod_base = OTHER; note = 2-Prime-O-Methyl modified nucleoside
  modified_base order(1^2,24^25): mod_base = OTHER; note = (1,3-dimethylimidazolidin-2-ylidene) Phosphoramidate linkage
  modified_base order(2^3,4..13,14^15,17..24): mod_base = OTHER; note = Phosphorothioate linkage
  modified_base 15^16: mod_base = OTHER; note = Mesylphosphoramidate linkage
  misc_feature 1..25: note = RM107325
ttggcatccagtcnncatgctgaca

SEQ ID NO: 1253 - DNA, 25 bp, synthetic construct
  source 1..25: mol_type = other DNA
  misc_feature 14..15: note = DNA
  misc_feature order(1..13,16..25): note = RNA
  modified_base 3: mod_base = OTHER; note = 2-Prime-O-Methoxyethyl modified nucleoside
  modified_base 13: mod_base = OTHER; note = 2-Prime-O-Methoxyethyl modified 5-methyl Cytidine
  modified_base order(1..2,18): mod_base = OTHER; note = 2-Prime-O-Methoxyethyl modified 5-methyl Uridine
  modified_base 14: mod_base = OTHER; note = DNA nucleotide carrying a 6-amino-5-nitro-3-yl-2(1H)-pyridone nucleobase
  modified_base 15: mod_base = OTHER; note = DNA nucleotide carrying a hypoxanthine nucleobase
  modified_base order(9,11,17,20,22..25): mod_base = OTHER; note = 2-Prime-Fluoro modified nucleoside
  modified_base order(4..8,10,12,16,19,21): mod_base = OTHER; note = 2-Prime-O-Methyl modified nucleoside
  modified_base order(1^2,24^25): mod_base = OTHER; note = (1,3-dimethylimidazolidin-2-ylidene) Phosphoramidate linkage
  modified_base order(4..13,14^15,17..24): mod_base = OTHER; note = Phosphorothioate linkage
  modified_base 15^16: mod_base = OTHER; note = Methylphosphonate linkage
  misc_feature 1..25: note = RM107326
ttggcatccagtcnncatgctgaca

SEQ ID NO: 1254 - DNA, 25 bp, synthetic construct
  source 1..25: mol_type = other DNA
  misc_feature 13..15: note = DNA
  misc_feature order(1..12,16..25): note = RNA
  modified_base 3: mod_base = OTHER; note = 2-Prime-O-Methoxyethyl modified nucleoside
  modified_base order(1..2,18): mod_base = OTHER; note = 2-Prime-O-Methoxyethyl modified 5-methyl Uridine
  modified_base 14: mod_base = OTHER; note = DNA nucleotide carrying a 6-amino-5-nitro-3-yl-2(1H)-pyridone nucleobase
  modified_base 15: mod_base = OTHER; note = DNA nucleotide carrying a hypoxanthine nucleobase
  modified_base order(9,11,17,20,22..25): mod_base = OTHER; note = 2-Prime-Fluoro modified nucleoside
  modified_base order(4..8,10,12,16,19,21): mod_base = OTHER; note = 2-Prime-O-Methyl modified nucleoside
  modified_base order(1^2,24^25): mod_base = OTHER; note = (1,3-dimethylimidazolidin-2-ylidene) Phosphoramidate linkage
  modified_base order(4..15,17..24): mod_base = OTHER; note = Phosphorothioate linkage
  modified_base 15^16: mod_base = OTHER; note = Methylphosphonate linkage
  misc_feature 1..25: note = RM107327
ttggcatccagtcnncatgctgaca

SEQ ID NO: 1255 - DNA, 25 bp, synthetic construct
  source 1..25: mol_type = other DNA
  misc_feature 13..15: note = DNA
  misc_feature order(1..12,16..25): note = RNA
  modified_base 3: mod_base = OTHER; note = 2-Prime-O-Methoxyethyl modified nucleoside
  modified_base order(1..2,18): mod_base = OTHER; note = 2-Prime-O-Methoxyethyl modified 5-methyl Uridine
  modified_base 14: mod_base = OTHER; note = DNA nucleotide carrying a 6-amino-5-nitro-3-yl-2(1H)-pyridone nucleobase
  modified_base 15: mod_base = OTHER; note = DNA nucleotide carrying a hypoxanthine nucleobase
  modified_base order(9,11,17,20,22..25): mod_base = OTHER; note = 2-Prime-Fluoro modified nucleoside
  modified_base order(4..8,10,12,16,19,21): mod_base = OTHER; note = 2-Prime-O-Methyl modified nucleoside
  modified_base order(1^2,24^25): mod_base = OTHER; note = (1,3-dimethylimidazolidin-2-ylidene) Phosphoramidate linkage
  modified_base order(4..15,17..24): mod_base = OTHER; note = Phosphorothioate linkage
  modified_base 15^16: mod_base = OTHER; note = Mesylphosphoramidate linkage
  misc_feature 1..25: note = RM107328
ttggcatccagtcnncatgctgaca

SEQ ID NO: 1256 - DNA, 25 bp, synthetic construct
  source 1..25: mol_type = other DNA
  misc_feature 14..15: note = DNA
  misc_feature order(1..13,16..25): note = RNA
  modified_base 3: mod_base = OTHER; note = 2-Prime-O-Methoxyethyl modified nucleoside
  modified_base 13: mod_base = OTHER; note = 2-Prime-O-Methoxyethyl modified 5-methyl Cytidine
  modified_base order(1..2,18): mod_base = OTHER; note = 2-Prime-O-Methoxyethyl modified 5-methyl Uridine
  modified_base 14: mod_base = OTHER; note = DNA nucleotide carrying a 6-amino-5-nitro-3-yl-2(1H)-pyridone nucleobase
  modified_base 15: mod_base = OTHER; note = DNA nucleotide carrying a hypoxanthine nucleobase
  modified_base order(9,11,17,20,22..25): mod_base = OTHER; note = 2-Prime-Fluoro modified nucleoside
  modified_base order(4..8,10,12,16,19,21): mod_base = OTHER; note = 2-Prime-O-Methyl modified nucleoside
  modified_base order(1^2,15^16,24^25): mod_base = OTHER; note = (1,3-dimethylimidazolidin-2-ylidene) Phosphoramidate linkage
  modified_base order(4..13,14^15,17..24): mod_base = OTHER; note = Phosphorothioate linkage
  misc_feature 1..25: note = RM107329
ttggcatccagtcnncatgctgaca

SEQ ID NO: 1257 - DNA, 25 bp, synthetic construct
  source 1..25: mol_type = other DNA
  misc_feature 14..15: note = DNA
  misc_feature order(1..13,16..25): note = RNA
  modified_base 3: mod_base = OTHER; note = 2-Prime-O-Methoxyethyl modified nucleoside
  modified_base 13: mod_base = OTHER; note = 2-Prime-O-Methoxyethyl modified 5-methyl Cytidine
  modified_base order(1..2,18): mod_base = OTHER; note = 2-Prime-O-Methoxyethyl modified 5-methyl Uridine
  modified_base 14: mod_base = OTHER; note = DNA nucleotide carrying a 6-amino-5-nitro-3-yl-2(1H)-pyridone nucleobase
  modified_base 15: mod_base = OTHER; note = DNA nucleotide carrying a hypoxanthine nucleobase
  modified_base order(9,11,17,20,22..25): mod_base = OTHER; note = 2-Prime-Fluoro modified nucleoside
  modified_base order(4..8,10,12,16,19,21): mod_base = OTHER; note = 2-Prime-O-Methyl modified nucleoside
  modified_base order(1^2,24^25): mod_base = OTHER; note = (1,3-dimethylimidazolidin-2-ylidene) Phosphoramidate linkage
  modified_base order(4..13,14^15,17..24): mod_base = OTHER; note = Phosphorothioate linkage
  modified_base 15^16: mod_base = OTHER; note = Mesylphosphoramidate linkage
  misc_feature 1..25: note = RM107330
ttggcatccagtcnncatgctgaca

SEQ ID NO: 1258 - DNA, 30 bp, synthetic construct
  source 1..30: mol_type = other DNA
  misc_feature 24..25: note = DNA
  misc_feature order(1..23,26..30): note = RNA
  modified_base 23: mod_base = OTHER; note = 2-Prime-O-Methoxyethyl modified 5-methyl Cytidine
  modified_base 28: mod_base = OTHER; note = 2-Prime-O-Methoxyethyl modified 5-methyl Uridine
  modified_base 24: mod_base = OTHER; note = DNA nucleotide carrying a 6-amino-5-nitro-3-yl-2(1H)-pyridone nucleobase
  modified_base 25: mod_base = OTHER; note = DNA nucleotide carrying a hypoxanthine nucleobase
  modified_base order(5..6,9..10,13..14,17..22,27): mod_base = OTHER; note = 2-Prime-Fluoro modified nucleoside
  modified_base order(1..4,7..8,11..12,15..16,26,29..30): mod_base = OTHER; note = 2-Prime-O-Methyl modified nucleoside
  modified_base order(1^2,29^30): mod_base = OTHER; note = (1,3-dimethylimidazolidin-2-ylidene) Phosphoramidate linkage
  modified_base order(2..23,24^25,27..29): mod_base = OTHER; note = Phosphorothioate linkage
  modified_base 25^26: mod_base = OTHER; note = Methylphosphonate linkage
  misc_feature 1..30: note = RM106867
gttggacatttttgcatccagtcnncatgc

SEQ ID NO: 1259 - DNA, 30 bp, synthetic construct
  source 1..30: mol_type = other DNA
  misc_feature 24..25: note = DNA
  misc_feature order(1..23,26..30): note = RNA
  modified_base 23: mod_base = OTHER; note = 2-Prime-O-Methoxyethyl modified 5-methyl Cytidine
  modified_base 28: mod_base = OTHER; note = 2-Prime-O-Methoxyethyl modified 5-methyl Uridine
  modified_base 24: mod_base = OTHER; note = DNA nucleotide carrying a 6-amino-5-nitro-3-yl-2(1H)-pyridone nucleobase
  modified_base 25: mod_base = OTHER; note = DNA nucleotide carrying a hypoxanthine nucleobase
  modified_base order(5..6,9..10,13..14,17..22,27): mod_base = OTHER; note = 2-Prime-Fluoro modified nucleoside
  modified_base order(1..4,7..8,11..12,15..16,26,29..30): mod_base = OTHER; note = 2-Prime-O-Methyl modified nucleoside
  modified_base order(1^2,29^30): mod_base = OTHER; note = (1,3-dimethylimidazolidin-2-ylidene) Phosphoramidate linkage
  modified_base order(2..23,24^25,27..29): mod_base = OTHER; note = Phosphorothioate linkage
  modified_base 25^26: mod_base = OTHER; note = Methylphosphonate linkage
  misc_feature 1..30: note = RM106868
gttggacatttttgcatcgtgtcnncatgc

SEQ ID NO: 1260 - DNA, 25 bp, synthetic construct
  source 1..25: mol_type = other DNA
  misc_feature 19..20: note = DNA
  misc_feature order(1..18,21..25): note = RNA
  modified_base order(18,23): mod_base = OTHER; note = 2-Prime-O-Methoxyethyl modified 5-methyl Cytidine
  modified_base 19: mod_base = OTHER; note = DNA nucleotide carrying a 6-amino-5-nitro-3-yl-2(1H)-pyridone nucleobase
  modified_base 20: mod_base = OTHER; note = DNA nucleotide carrying a hypoxanthine nucleobase
  modified_base order(3..7,12,14,16..17,22): mod_base = OTHER; note = 2-Prime-Fluoro modified nucleoside
  modified_base order(1..2,8..11,13,15,21,24..25): mod_base = OTHER; note = 2-Prime-O-Methyl modified nucleoside
  modified_base order(1^2,24^25): mod_base = OTHER; note = (1,3-dimethylimidazolidin-2-ylidene) Phosphoramidate linkage
  modified_base order(2..18,19^20,22..24): mod_base = OTHER; note = Phosphorothioate linkage
  modified_base 20^21: mod_base = OTHER; note = Methylphosphonate linkage
  misc_feature 1..25: note = RM117635
aggggcatgatgccatacnntgcca

SEQ ID NO: 1261 - DNA, 25 bp, synthetic construct
  source 1..25: mol_type = other DNA
  misc_feature 19..20: note = DNA
  misc_feature order(1..18,21..25): note = RNA
  modified_base order(18,23): mod_base = OTHER; note = 2-Prime-O-Methoxyethyl modified 5-methyl Cytidine
  modified_base 19: mod_base = OTHER; note = DNA nucleotide carrying a 6-amino-5-nitro-3-yl-2(1H)-pyridone nucleobase
  modified_base 20: mod_base = OTHER; note = DNA nucleotide carrying a hypoxanthine nucleobase
  modified_base order(3..7,12,14,16..17,22): mod_base = OTHER; note = 2-Prime-Fluoro modified nucleoside
  modified_base order(1..2,8..11,13,15,21,24..25): mod_base = OTHER; note = 2-Prime-O-Methyl modified nucleoside
  modified_base order(1^2,24^25): mod_base = OTHER; note = Mesylphosphoramidate linkage
  modified_base order(2..18,19^20,22..24): mod_base = OTHER; note = Phosphorothioate linkage
  modified_base 20^21: mod_base = OTHER; note = Methylphosphonate linkage
  misc_feature 1..25: note = RM117636
aggggcatgatgccatacnntgcca

SEQ ID NO: 1262 - DNA, 25 bp, synthetic construct
  source 1..25: mol_type = other DNA
  misc_feature 19..20: note = DNA
  misc_feature order(1..18,21..25): note = RNA
  modified_base order(18,23): mod_base = OTHER; note = 2-Prime-O-Methoxyethyl modified 5-methyl Cytidine
  modified_base 19: mod_base = OTHER; note = DNA nucleotide carrying a 6-amino-5-nitro-3-yl-2(1H)-pyridone nucleobase
  modified_base 20: mod_base = OTHER; note = DNA nucleotide carrying a hypoxanthine nucleobase
  modified_base order(3..7,12,14,16..17,22): mod_base = OTHER; note = 2-Prime-Fluoro modified nucleoside
  modified_base order(1..2,8..11,13,15,21,24..25): mod_base = OTHER; note = 2-Prime-O-Methyl modified nucleoside
  modified_base order(1^2,18^19,24^25): mod_base = OTHER; note = Mesylphosphoramidate linkage
  modified_base order(2..18,19^20,22..24): mod_base = OTHER; note = Phosphorothioate linkage
  modified_base 20^21: mod_base = OTHER; note = Methylphosphonate linkage
  misc_feature 1..25: note = RM117637
aggggcatgatgccatacnntgcca

SEQ ID NO: 1263 - DNA, 25 bp, synthetic construct
  source 1..25: mol_type = other DNA
  misc_feature 19..20: note = DNA
  misc_feature order(1..18,21..25): note = RNA
  modified_base order(18,23): mod_base = OTHER; note = 2-Prime-O-Methoxyethyl modified 5-methyl Cytidine
  modified_base 19: mod_base = OTHER; note = DNA nucleotide carrying a 6-amino-5-nitro-3-yl-2(1H)-pyridone nucleobase
  modified_base 20: mod_base = OTHER; note = DNA nucleotide carrying a hypoxanthine nucleobase
  modified_base order(3..7,12,14,16..17,22): mod_base = OTHER; note = 2-Prime-Fluoro modified nucleoside
  modified_base order(1..2,8..11,13,15,21,24..25): mod_base = OTHER; note = 2-Prime-O-Methyl modified nucleoside
  modified_base order(1^2,4^5,7^8,10^11,13^14,16^17,18^19,22^23,24^25): mod_base = OTHER; note = Mesylphosphoramidate linkage
  modified_base order(2..4,5..7,8..10,11..13,14..16,17^18,19^20,23^24): mod_base = OTHER; note = Phosphorothioate linkage
  modified_base 20^21: mod_base = OTHER; note = Methylphosphonate linkage
  misc_feature 1..25: note = RM117638
aggggcatgatgccatacnntgcca

SEQ ID NO: 1264 - DNA, 25 bp, synthetic construct
  source 1..25: mol_type = other DNA
  misc_feature 19..20: note = DNA
  misc_feature order(1..18,21..25): note = RNA
  modified_base order(18,23): mod_base = OTHER; note = 2-Prime-O-Methoxyethyl modified 5-methyl Cytidine
  modified_base 19: mod_base = OTHER; note = DNA nucleotide carrying a 6-amino-5-nitro-3-yl-2(1H)-pyridone nucleobase
  modified_base 20: mod_base = OTHER; note = DNA nucleotide carrying a hypoxanthine nucleobase
  modified_base order(3..7,12,14,16..17,22): mod_base = OTHER; note = 2-Prime-Fluoro modified nucleoside
  modified_base order(1..2,8..11,13,15,21,24..25): mod_base = OTHER; note = 2-Prime-O-Methyl modified nucleoside
  modified_base order(1^2,3..5,6..8,9..11,12..14,15..17,18^19,22^23,24^25): mod_base = OTHER; note = Mesylphosphoramidate linkage
  modified_base order(2^3,5^6,8^9,11^12,14^15,17^18,19^20,23^24): mod_base = OTHER; note = Phosphorothioate linkage
  modified_base 20^21: mod_base = OTHER; note = Methylphosphonate linkage
  misc_feature 1..25: note = RM117639
aggggcatgatgccatacnntgcca

SEQ ID NO: 1265 - DNA, 25 bp, synthetic construct
  source 1..25: mol_type = other DNA
  misc_feature 19..20: note = DNA
  misc_feature order(1..18,21..25): note = RNA
  modified_base order(18,23): mod_base = OTHER; note = 2-Prime-O-Methoxyethyl modified 5-methyl Cytidine
  modified_base 19: mod_base = OTHER; note = DNA nucleotide carrying a 6-amino-5-nitro-3-yl-2(1H)-pyridone nucleobase
  modified_base 20: mod_base = OTHER; note = DNA nucleotide carrying a hypoxanthine nucleobase
  modified_base order(3..7,12,14,16..17,22): mod_base = OTHER; note = 2-Prime-Fluoro modified nucleoside
  modified_base order(1..2,8..11,13,15,21,24..25): mod_base = OTHER; note = 2-Prime-O-Methyl modified nucleoside
  modified_base order(1^2,4^5,7^8,10^11,13^14,16^17,22^23,24^25): mod_base = OTHER; note = Mesylphosphoramidate linkage
  modified_base order(2..4,5..7,8..10,11..13,14..16,17..20,23^24): mod_base = OTHER; note = Phosphorothioate linkage
  modified_base 20^21: mod_base = OTHER; note = Methylphosphonate linkage
  misc_feature 1..25: note = RM117640
aggggcatgatgccatacnntgcca

SEQ ID NO: 1266 - DNA, 25 bp, synthetic construct
  source 1..25: mol_type = other DNA
  misc_feature 19..20: note = DNA
  misc_feature order(1..18,21..25): note = RNA
  modified_base order(18,23): mod_base = OTHER; note = 2-Prime-O-Methoxyethyl modified 5-methyl Cytidine
  modified_base 19: mod_base = OTHER; note = DNA nucleotide carrying a 6-amino-5-nitro-3-yl-2(1H)-pyridone nucleobase
  modified_base 20: mod_base = OTHER; note = DNA nucleotide carrying a hypoxanthine nucleobase
  modified_base order(3..7,12,14,16..17,22): mod_base = OTHER; note = 2-Prime-Fluoro modified nucleoside
  modified_base order(1..2,8..11,13,15,21,24..25): mod_base = OTHER; note = 2-Prime-O-Methyl modified nucleoside
  modified_base order(1^2,3..5,6..8,9..11,12..14,15..17,22^23,24^25): mod_base = OTHER; note = Mesylphosphoramidate linkage
  modified_base order(2^3,5^6,8^9,11^12,14^15,17..20,23^24): mod_base = OTHER; note = Phosphorothioate linkage
  modified_base 20^21: mod_base = OTHER; note = Methylphosphonate linkage
  misc_feature 1..25: note = RM117641
aggggcatgatgccatacnntgcca

SEQ ID NO: 1267 - DNA, 25 bp, synthetic construct
  source 1..25: mol_type = other DNA
  misc_feature 18..20: note = DNA
  misc_feature order(1..17,21..25): note = RNA
  modified_base 23: mod_base = OTHER; note = 2-Prime-O-Methoxyethyl modified 5-methyl Cytidine
  modified_base 19: mod_base = OTHER; note = DNA nucleotide carrying a 6-amino-5-nitro-3-yl-2(1H)-pyridone nucleobase
  modified_base 20: mod_base = OTHER; note = DNA nucleotide carrying a hypoxanthine nucleobase
  modified_base order(3..7,12,14,16..17,22): mod_base = OTHER; note = 2-Prime-Fluoro modified nucleoside
  modified_base order(1..2,8..11,13,15,21,24..25): mod_base = OTHER; note = 2-Prime-O-Methyl modified nucleoside
  modified_base order(1^2,4^5,7^8,10^11,13^14,16^17,22^23,24^25): mod_base = OTHER; note = Mesylphosphoramidate linkage
  modified_base order(2..4,5..7,8..10,11..13,14..16,17..20,23^24): mod_base = OTHER; note = Phosphorothioate linkage
  modified_base 20^21: mod_base = OTHER; note = Methylphosphonate linkage
  misc_feature 1..25: note = RM117642
aggggcatgatgccatacnntgcca

SEQ ID NO: 1268 - DNA, 25 bp, synthetic construct
  source 1..25: mol_type = other DNA
  misc_feature 18..20: note = DNA
  misc_feature order(1..17,21..25): note = RNA
  modified_base 23: mod_base = OTHER; note = 2-Prime-O-Methoxyethyl modified 5-methyl Cytidine
  modified_base 19: mod_base = OTHER; note = DNA nucleotide carrying a 6-amino-5-nitro-3-yl-2(1H)-pyridone nucleobase
  modified_base 20: mod_base = OTHER; note = DNA nucleotide carrying a hypoxanthine nucleobase
  modified_base order(3..7,12,14,16..17,22): mod_base = OTHER; note = 2-Prime-Fluoro modified nucleoside
  modified_base order(1..2,8..11,13,15,21,24..25): mod_base = OTHER; note = 2-Prime-O-Methyl modified nucleoside
  modified_base order(1^2,3..5,6..8,9..11,12..14,15..17,22^23,24^25): mod_base = OTHER; note = Mesylphosphoramidate linkage
  modified_base order(2^3,5^6,8^9,11^12,14^15,17..20,23^24): mod_base = OTHER; note = Phosphorothioate linkage
  modified_base 20^21: mod_base = OTHER; note = Methylphosphonate linkage
  misc_feature 1..25: note = RM117643
aggggcatgatgccatacnntgcca

SEQ ID NO: 1269 - DNA, 27 bp, synthetic construct
  source 1..27: mol_type = other DNA
  misc_feature 13..15: note = DNA
  misc_feature order(1..12,16..27): note = RNA
  modified_base 2: mod_base = OTHER; note = 2-Prime-O-Methoxyethyl modified nucleoside
  modified_base order(1,18): mod_base = OTHER; note = 2-Prime-O-Methoxyethyl modified 5-methyl Cytidine
  modified_base 3: mod_base = OTHER; note = 2-Prime-O-Methoxyethyl modified 5-methyl Uridine
  modified_base 14: mod_base = OTHER; note = DNA nucleotide carrying a 6-amino-5-nitro-3-yl-2(1H)-pyridone nucleobase
  modified_base 15: mod_base = OTHER; note = DNA nucleotide carrying a hypoxanthine nucleobase
  modified_base order(7,9,11,17,20,22,24): mod_base = OTHER; note = 2-Prime-Fluoro modified nucleoside
  modified_base order(4..6,8,10,12,16,19,21,23,25..27): mod_base = OTHER; note = 2-Prime-O-Methyl modified nucleoside
  modified_base order(1^2,3^4,5^6,7^8,9^10,11^12,15^16,20^21,22^23,24^25,26^27): mod_base = OTHER; note = Mesylphosphoramidate linkage
  modified_base order(4^5,6^7,8^9,10^11,12..15,17..20,21^22,23^24,25^26): mod_base = OTHER; note = Phosphorothioate linkage
  misc_feature 1..27: note = RM117644
catgatgccatacnntgccaccagggc

SEQ ID NO: 1270 - DNA, 27 bp, synthetic construct
  source 1..27: mol_type = other DNA
  misc_feature 13..15: note = DNA
  misc_feature order(1..12,16..27): note = RNA
  modified_base 2: mod_base = OTHER; note = 2-Prime-O-Methoxyethyl modified nucleoside
  modified_base order(1,18): mod_base = OTHER; note = 2-Prime-O-Methoxyethyl modified 5-methyl Cytidine
  modified_base 3: mod_base = OTHER; note = 2-Prime-O-Methoxyethyl modified 5-methyl Uridine
  modified_base 14: mod_base = OTHER; note = DNA nucleotide carrying a 6-amino-5-nitro-3-yl-2(1H)-pyridone nucleobase
  modified_base 15: mod_base = OTHER; note = DNA nucleotide carrying a hypoxanthine nucleobase
  modified_base order(7,9,11,17,20,22,24): mod_base = OTHER; note = 2-Prime-Fluoro modified nucleoside
  modified_base order(4..6,8,10,12,16,19,21,23,25..27): mod_base = OTHER; note = 2-Prime-O-Methyl modified nucleoside
  modified_base order(1^2,3^4,5^6,7^8,9^10,11^12,15..17,18^19,20^21,22^23,24^25,26^27): mod_base = OTHER; note = Mesylphosphoramidate linkage
  modified_base order(4^5,6^7,8^9,10^11,12..15,17^18,19^20,21^22,23^24,25^26): mod_base = OTHER; note = Phosphorothioate linkage
  misc_feature 1..27: note = RM117645
catgatgccatacnntgccaccagggc

SEQ ID NO: 1271 - DNA, 25 bp, synthetic construct
  source 1..25: mol_type = other DNA
  misc_feature 13..15: note = DNA
  misc_feature order(1..12,16..25): note = RNA
  modified_base 2: mod_base = OTHER; note = 2-Prime-O-Methoxyethyl modified nucleoside
  modified_base order(1,18): mod_base = OTHER; note = 2-Prime-O-Methoxyethyl modified 5-methyl Cytidine
  modified_base 3: mod_base = OTHER; note = 2-Prime-O-Methoxyethyl modified 5-methyl Uridine
  modified_base 14: mod_base = OTHER; note = DNA nucleotide carrying a 6-amino-5-nitro-3-yl-2(1H)-pyridone nucleobase
  modified_base 15: mod_base = OTHER; note = DNA nucleotide carrying a hypoxanthine nucleobase
  modified_base order(7,9,11,17,20,22,24): mod_base = OTHER; note = 2-Prime-Fluoro modified nucleoside
  modified_base order(4..6,8,10,12,16,19,21,23,25): mod_base = OTHER; note = 2-Prime-O-Methyl modified nucleoside
  modified_base order(1^2,3^4,5^6,7^8,9^10,11^12,15^16,20^21,22^23,24^25): mod_base = OTHER; note = Mesylphosphoramidate linkage
  modified_base order(4^5,6^7,8^9,10^11,12..15,17..20,21^22,23^24): mod_base = OTHER; note = Phosphorothioate linkage
  misc_feature 1..25: note = RM117646
catgatgccatacnntgccaccagg

SEQ ID NO: 1272 - DNA, 25 bp, synthetic construct
  source 1..25: mol_type = other DNA
  misc_feature 13..15: note = DNA
  misc_feature order(1..12,16..25): note = RNA
  modified_base 2: mod_base = OTHER; note = 2-Prime-O-Methoxyethyl modified nucleoside
  modified_base order(1,18): mod_base = OTHER; note = 2-Prime-O-Methoxyethyl modified 5-methyl Cytidine
  modified_base 3: mod_base = OTHER; note = 2-Prime-O-Methoxyethyl modified 5-methyl Uridine
  modified_base 14: mod_base = OTHER; note = DNA nucleotide carrying a 6-amino-5-nitro-3-yl-2(1H)-pyridone nucleobase
  modified_base 15: mod_base = OTHER; note = DNA nucleotide carrying a hypoxanthine nucleobase
  modified_base order(7,9,11,17,20,22,24): mod_base = OTHER; note = 2-Prime-Fluoro modified nucleoside
  modified_base order(4..6,8,10,12,16,19,21,23,25): mod_base = OTHER; note = 2-Prime-O-Methyl modified nucleoside
  modified_base order(1^2,3^4,5^6,7^8,9^10,11^12,13^14,15..17,18^19,20^21,22^23,24^25): mod_base = OTHER; note = Mesylphosphoramidate linkage
  modified_base order(4^5,6^7,8^9,10^11,12^13,14^15,17^18,19^20,21^22,23^24): mod_base = OTHER; note = Phosphorothioate linkage
  misc_feature 1..25: note = RM117647
catgatgccatacnntgccaccagg

SEQ ID NO: 1273 - DNA, 25 bp, synthetic construct
  source 1..25: mol_type = other DNA
  misc_feature 18..20: note = DNA
  misc_feature order(1..17,21..25): note = RNA
  modified_base order(1..2,5,15): mod_base = OTHER; note = 2-Prime-O-Methoxyethyl modified nucleoside
  modified_base 23: mod_base = OTHER; note = 2-Prime-O-Methoxyethyl modified 5-methyl Cytidine
  modified_base order(11,16): mod_base = OTHER; note = 2-Prime-O-Methoxyethyl modified 5-methyl Uridine
  modified_base 19: mod_base = OTHER; note = DNA nucleotide carrying a 6-amino-5-nitro-3-yl-2(1H)-pyridone nucleobase
  modified_base 20: mod_base = OTHER; note = DNA nucleotide carrying a hypoxanthine nucleobase
  modified_base order(3,6..7,9,14,17,22): mod_base = OTHER; note = 2-Prime-Fluoro modified nucleoside
  modified_base order(4,8,10,12..13,21,24..25): mod_base = OTHER; note = 2-Prime-O-Methyl modified nucleoside
  modified_base order(1^2,6^7,9^10,14^15,24^25): mod_base = OTHER; note = (1,3-dimethylimidazolidin-2-ylidene) Phosphoramidate linkage
  modified_base order(3^4,5^6,8^9,12..14,17..20,22..24): mod_base = OTHER; note = Phosphorothioate linkage
  modified_base 20^21: mod_base = OTHER; note = Methylphosphonate linkage
  misc_feature 1..25: note = RM117837
aggggcatgatgccatacnntgcca

SEQ ID NO: 1274 - DNA, 25 bp, synthetic construct
  source 1..25: mol_type = other DNA
  misc_feature 18..20: note = DNA
  misc_feature order(1..17,21..25): note = RNA
  modified_base order(1..2,5,15): mod_base = OTHER; note = 2-Prime-O-Methoxyethyl modified nucleoside
  modified_base 23: mod_base = OTHER; note = 2-Prime-O-Methoxyethyl modified 5-methyl Cytidine
  modified_base order(11,16): mod_base = OTHER; note = 2-Prime-O-Methoxyethyl modified 5-methyl Uridine
  modified_base 19: mod_base = OTHER; note = DNA nucleotide carrying a 6-amino-5-nitro-3-yl-2(1H)-pyridone nucleobase
  modified_base 20: mod_base = OTHER; note = DNA nucleotide carrying a hypoxanthine nucleobase
  modified_base order(3,6..7,9,14,17,22): mod_base = OTHER; note = 2-Prime-Fluoro modified nucleoside
  modified_base order(4,8,10,12..13,21,24..25): mod_base = OTHER; note = 2-Prime-O-Methyl modified nucleoside
  modified_base order(1^2,6^7,9^10,14^15,24^25): mod_base = OTHER; note = Mesylphosphoramidate linkage
  modified_base order(3^4,5^6,8^9,12..14,17..20,22..24): mod_base = OTHER; note = Phosphorothioate linkage
  modified_base 20^21: mod_base = OTHER; note = Methylphosphonate linkage
  misc_feature 1..25: note = RM117838
aggggcatgatgccatacnntgcca

SEQ ID NO: 1275 - DNA, 25 bp, synthetic construct
  source 1..25: mol_type = other DNA
  misc_feature 18..20: note = DNA
  misc_feature order(1..17,21..25): note = RNA
  modified_base order(1..2,5,15): mod_base = OTHER; note = 2-Prime-O-Methoxyethyl modified nucleoside
  modified_base 23: mod_base = OTHER; note = 2-Prime-O-Methoxyethyl modified 5-methyl Cytidine
  modified_base order(11,16): mod_base = OTHER; note = 2-Prime-O-Methoxyethyl modified 5-methyl Uridine
  modified_base 19: mod_base = OTHER; note = DNA nucleotide carrying a 6-amino-5-nitro-3-yl-2(1H)-pyridone nucleobase
  modified_base 20: mod_base = OTHER; note = DNA nucleotide carrying a hypoxanthine nucleobase
  modified_base order(3,6..7,9,14,17,22): mod_base = OTHER; note = 2-Prime-Fluoro modified nucleoside
  modified_base order(4,8,10,12..13,21,24..25): mod_base = OTHER; note = 2-Prime-O-Methyl modified nucleoside
  modified_base order(1^2,6^7,9^10,14^15,24^25): mod_base = OTHER; note = Mesylphosphoramidate linkage
  modified_base order(2..4,5^6,8^9,11..14,15..20,22..24): mod_base = OTHER; note = Phosphorothioate linkage
  modified_base 20^21: mod_base = OTHER; note = Methylphosphonate linkage
  misc_feature 1..25: note = RM117839
aggggcatgatgccatacnntgcca

SEQ ID NO: 1276 - DNA, 25 bp, synthetic construct
  source 1..25: mol_type = other DNA
  misc_feature 18..20: note = DNA
  misc_feature order(1..17,21..25): note = RNA
  modified_base order(1..2,5,15): mod_base = OTHER; note = 2-Prime-O-Methoxyethyl modified nucleoside
  modified_base 23: mod_base = OTHER; note = 2-Prime-O-Methoxyethyl modified 5-methyl Cytidine
  modified_base order(11,16): mod_base = OTHER; note = 2-Prime-O-Methoxyethyl modified 5-methyl Uridine
  modified_base 19: mod_base = OTHER; note = DNA nucleotide carrying a 6-amino-5-nitro-3-yl-2(1H)-pyridone nucleobase
  modified_base 20: mod_base = OTHER; note = DNA nucleotide carrying a hypoxanthine nucleobase
  modified_base order(3,6..7,9,14,17,22): mod_base = OTHER; note = 2-Prime-Fluoro modified nucleoside
  modified_base order(4,8,10,12..13,21,24..25): mod_base = OTHER; note = 2-Prime-O-Methyl modified nucleoside
  modified_base order(1^2,4^5,6^7,9..11,14^15,21^22,24^25): mod_base = OTHER; note = Mesylphosphoramidate linkage
  modified_base order(2..4,5^6,8^9,11..14,15..20,22..24): mod_base = OTHER; note = Phosphorothioate linkage
  modified_base 20^21: mod_base = OTHER; note = Methylphosphonate linkage
  misc_feature 1..25: note = RM117840
aggggcatgatgccatacnntgcca

SEQ ID NO: 1277 - DNA, 25 bp, synthetic construct
  source 1..25: mol_type = other DNA
  misc_feature 18..20: note = DNA
  misc_feature order(1..17,21..25): note = RNA
  modified_base order(1..2,5,15): mod_base = OTHER; note = 2-Prime-O-Methoxyethyl modified nucleoside
  modified_base 23: mod_base = OTHER; note = 2-Prime-O-Methoxyethyl modified 5-methyl Cytidine
  modified_base order(11,16): mod_base = OTHER; note = 2-Prime-O-Methoxyethyl modified 5-methyl Uridine
  modified_base 19: mod_base = OTHER; note = DNA nucleotide carrying a 6-amino-5-nitro-3-yl-2(1H)-pyridone nucleobase
  modified_base 20: mod_base = OTHER; note = DNA nucleotide carrying a hypoxanthine nucleobase
  modified_base order(3,6..7,9,14,17,22): mod_base = OTHER; note = 2-Prime-Fluoro modified nucleoside
  modified_base order(4,8,10,12..13,21,24..25): mod_base = OTHER; note = 2-Prime-O-Methyl modified nucleoside
  modified_base order(1..3,6^7,9^10,11^12,14..16,24^25): mod_base = OTHER; note = Mesylphosphoramidate linkage
  modified_base order(3^4,5^6,8^9,12..14,17..20,22..24): mod_base = OTHER; note = Phosphorothioate linkage
  modified_base 20^21: mod_base = OTHER; note = Methylphosphonate linkage
  misc_feature 1..25: note = RM117841
aggggcatgatgccatacnntgcca

SEQ ID NO: 1278 - DNA, 25 bp, synthetic construct
  source 1..25: mol_type = other DNA
  misc_feature 18..20: note = DNA
  misc_feature order(1..17,21..25): note = RNA
  modified_base order(1..2,5,15): mod_base = OTHER; note = 2-Prime-O-Methoxyethyl modified nucleoside
  modified_base 23: mod_base = OTHER; note = 2-Prime-O-Methoxyethyl modified 5-methyl Cytidine
  modified_base order(11,16): mod_base = OTHER; note = 2-Prime-O-Methoxyethyl modified 5-methyl Uridine
  modified_base 19: mod_base = OTHER; note = DNA nucleotide carrying a 6-amino-5-nitro-3-yl-2(1H)-pyridone nucleobase
  modified_base 20: mod_base = OTHER; note = DNA nucleotide carrying a hypoxanthine nucleobase
  modified_base order(3,6..7,9,14,17,22): mod_base = OTHER; note = 2-Prime-Fluoro modified nucleoside
  modified_base order(4,8,10,12..13,21,24..25): mod_base = OTHER; note = 2-Prime-O-Methyl modified nucleoside
  modified_base order(1..3,4^5,6^7,9..12,14..17,21^22,24^25): mod_base = OTHER; note = Mesylphosphoramidate linkage
  modified_base order(3^4,5^6,8^9,12..14,17..20,22..24): mod_base = OTHER; note = Phosphorothioate linkage
  modified_base 20^21: mod_base = OTHER; note = Methylphosphonate linkage
  misc_feature 1..25: note = RM117842
aggggcatgatgccatacnntgcca

SEQ ID NO: 1279 - DNA, 25 bp, synthetic construct
  source 1..25: mol_type = other DNA
  misc_feature 18..20: note = DNA
  misc_feature order(1..17,21..25): note = RNA
  modified_base order(1..2,5,15): mod_base = OTHER; note = 2-Prime-O-Methoxyethyl modified nucleoside
  modified_base 23: mod_base = OTHER; note = 2-Prime-O-Methoxyethyl modified 5-methyl Cytidine
  modified_base order(11,16): mod_base = OTHER; note = 2-Prime-O-Methoxyethyl modified 5-methyl Uridine
  modified_base 19: mod_base = OTHER; note = DNA nucleotide carrying a 6-amino-5-nitro-3-yl-2(1H)-pyridone nucleobase
  modified_base 20: mod_base = OTHER; note = DNA nucleotide carrying a hypoxanthine nucleobase
  modified_base order(3,6..7,9,14,17,22): mod_base = OTHER; note = 2-Prime-Fluoro modified nucleoside
  modified_base order(4,8,10,12..13,21,24..25): mod_base = OTHER; note = 2-Prime-O-Methyl modified nucleoside
  modified_base order(1^2,6^7,9^10,14^15,24^25): mod_base = OTHER; note = (1,3-dimethylimidazolidin-2-ylidene) Phosphoramidate linkage
  modified_base order(2..4,5^6,8^9,11..14,15..20,22..24): mod_base = OTHER; note = Phosphorothioate linkage
  modified_base order(4^5,7^8,10^11,21^22): mod_base = OTHER; note = Mesylphosphoramidate linkage
  modified_base 20^21: mod_base = OTHER; note = Methylphosphonate linkage
  misc_feature 1..25: note = RM117843
aggggcatgatgccatacnntgcca

SEQ ID NO: 1280 - DNA, 25 bp, synthetic construct
  source 1..25: mol_type = other DNA
  misc_feature 18..20: note = DNA
  misc_feature order(1..17,21..25): note = RNA
  modified_base order(1..2,5,15): mod_base = OTHER; note = 2-Prime-O-Methoxyethyl modified nucleoside
  modified_base 23: mod_base = OTHER; note = 2-Prime-O-Methoxyethyl modified 5-methyl Cytidine
  modified_base order(11,16): mod_base = OTHER; note = 2-Prime-O-Methoxyethyl modified 5-methyl Uridine
  modified_base 19: mod_base = OTHER; note = DNA nucleotide carrying a 6-amino-5-nitro-3-yl-2(1H)-pyridone nucleobase
  modified_base 20: mod_base = OTHER; note = DNA nucleotide carrying a hypoxanthine nucleobase
  modified_base order(3,6..7,9,14,17,22): mod_base = OTHER; note = 2-Prime-Fluoro modified nucleoside
  modified_base order(4,8,10,12..13,21,24..25): mod_base = OTHER; note = 2-Prime-O-Methyl modified nucleoside
  modified_base order(1^2,6^7,9^10,14^15,24^25): mod_base = OTHER; note = (1,3-dimethylimidazolidin-2-ylidene) Phosphoramidate linkage
  modified_base order(2..4,5^6,8^9,11..14,15..20,22..24): mod_base = OTHER; note = Phosphorothioate linkage
  modified_base order(4^5,7^8,10^11,20..22): mod_base = OTHER; note = Mesylphosphoramidate linkage
  misc_feature 1..25: note = RM117844
aggggcatgatgccatacnntgcca

SEQ ID NO: 1281 - DNA, 25 bp, synthetic construct
  source 1..25: mol_type = other DNA
  misc_feature 18..20: note = DNA
  misc_feature order(1..17,21..25): note = RNA
  modified_base order(1..2,5,15): mod_base = OTHER; note = 2-Prime-O-Methoxyethyl modified nucleoside
  modified_base 23: mod_base = OTHER; note = 2-Prime-O-Methoxyethyl modified 5-methyl Cytidine
  modified_base order(11,16): mod_base = OTHER; note = 2-Prime-O-Methoxyethyl modified 5-methyl Uridine
  modified_base 19: mod_base = OTHER; note = DNA nucleotide carrying a 6-amino-5-nitro-3-yl-2(1H)-pyridone nucleobase
  modified_base 20: mod_base = OTHER; note = DNA nucleotide carrying a hypoxanthine nucleobase
  modified_base order(3,6..7,9,14,17,22): mod_base = OTHER; note = 2-Prime-Fluoro modified nucleoside
  modified_base order(4,8,10,12..13,21,24..25): mod_base = OTHER; note = 2-Prime-O-Methyl modified nucleoside
  modified_base order(1^2,6^7,9^10,14^15,24^25): mod_base = OTHER; note = (1,3-dimethylimidazolidin-2-ylidene) Phosphoramidate linkage
  modified_base order(3^4,5^6,8^9,12..14,22..24): mod_base = OTHER; note = Mesylphosphoramidate linkage
  modified_base 17..20: mod_base = OTHER; note = Phosphorothioate linkage
  modified_base 20^21: mod_base = OTHER; note = Methylphosphonate linkage
  misc_feature 1..25: note = RM117845
aggggcatgatgccatacnntgcca

SEQ ID NO: 1282 - DNA, 25 bp, synthetic construct
  source 1..25: mol_type = other DNA
  misc_feature 18..20: note = DNA
  misc_feature order(1..17,21..25): note = RNA
  modified_base order(1..2,5,15): mod_base = OTHER; note = 2-Prime-O-Methoxyethyl modified nucleoside
  modified_base 23: mod_base = OTHER; note = 2-Prime-O-Methoxyethyl modified 5-methyl Cytidine
  modified_base order(11,16): mod_base = OTHER; note = 2-Prime-O-Methoxyethyl modified 5-methyl Uridine
  modified_base 19: mod_base = OTHER; note = DNA nucleotide carrying a 6-amino-5-nitro-3-yl-2(1H)-pyridone nucleobase
  modified_base 20: mod_base = OTHER; note = DNA nucleotide carrying a hypoxanthine nucleobase
  modified_base order(3,6..7,9,14,17,22): mod_base = OTHER; note = 2-Prime-Fluoro modified nucleoside
  modified_base order(4,8,10,12..13,21,24..25): mod_base = OTHER; note = 2-Prime-O-Methyl modified nucleoside
  modified_base order(1^2,6^7,9^10,14^15,24^25): mod_base = OTHER; note = (1,3-dimethylimidazolidin-2-ylidene) Phosphoramidate linkage
  modified_base order(2^3,11^12,15..20): mod_base = OTHER; note = Phosphorothioate linkage
  modified_base order(3^4,5^6,8^9,12..14,22..24): mod_base = OTHER; note = Mesylphosphoramidate linkage
  modified_base 20^21: mod_base = OTHER; note = Methylphosphonate linkage
  misc_feature 1..25: note = RM117846
aggggcatgatgccatacnntgcca

SEQ ID NO: 1283 - DNA, 30 bp, synthetic construct; identical to SEQ ID NO: 29
  source 1..30: mol_type = other DNA
  misc_feature 24..25: note = DNA
  misc_feature order(1..23,26..30): note = RNA
  modified_base order(23,28): mod_base = OTHER; note = 2-Prime-O-Methoxyethyl modified 5-methyl Cytidine
  modified_base 24: mod_base = OTHER; note = DNA nucleotide carrying a 6-amino-5-nitro-3-yl-2(1H)-pyridone nucleobase
  modified_base 25: mod_base = OTHER; note = DNA nucleotide carrying a hypoxanthine nucleobase
  modified_base order(4..5,8..9,11,13..15,17..19,22,27): mod_base = OTHER; note = 2-Prime-Fluoro modified nucleoside
  modified_base order(1..3,6..7,10,12,16,20..21,26,29..30): mod_base = OTHER; note = 2-Prime-O-Methyl modified nucleoside
  modified_base order(1^2,11^12,14^15,29^30): mod_base = OTHER; note = (1,3-dimethylimidazolidin-2-ylidene) Phosphoramidate linkage
  modified_base order(2..6,7..9,10^11,13^14,16..20,22^23,24^25,27..29): mod_base = OTHER; note = Phosphorothioate linkage
  modified_base 25^26: mod_base = OTHER; note = Methylphosphonate linkage
  misc_feature 1..30: note = RM108820

SEQ ID NO: 1284 - DNA, 30 bp, synthetic construct; identical to SEQ ID NO: 29
  source 1..30: mol_type = other DNA
  misc_feature 23..25: note = DNA
  misc_feature order(1..22,26..30): note = RNA
  modified_base 28: mod_base = OTHER; note = 2-Prime-O-Methoxyethyl modified 5-methyl Cytidine
  modified_base 24: mod_base = OTHER; note = DNA nucleotide carrying a 6-amino-5-nitro-3-yl-2(1H)-pyridone nucleobase
  modified_base 25: mod_base = OTHER; note = DNA nucleotide carrying a hypoxanthine nucleobase
  modified_base order(4..5,8..9,11,13..15,17..19,22,27): mod_base = OTHER; note = 2-Prime-Fluoro modified nucleoside
  modified_base order(1..3,6..7,10,12,16,20..21,26,29..30): mod_base = OTHER; note = 2-Prime-O-Methyl modified nucleoside
  modified_base order(1^2,11^12,14^15,29^30): mod_base = OTHER; note = (1,3-dimethylimidazolidin-2-ylidene) Phosphoramidate linkage
  modified_base order(2..6,7..9,10^11,13^14,16..20,22..25,27..29): mod_base = OTHER; note = Phosphorothioate linkage
  modified_base 25^26: mod_base = OTHER; note = Methylphosphonate linkage
  misc_feature 1..30: note = RM108821

SEQ ID NO: 1285 - DNA, 30 bp, synthetic construct; identical to SEQ ID NO: 29
  source 1..30: mol_type = other DNA
  misc_feature 23..25: note = DNA
  misc_feature order(1..22,26..30): note = RNA
  modified_base 28: mod_base = OTHER; note = 2-Prime-O-Methoxyethyl modified 5-methyl Cytidine
  modified_base 24: mod_base = OTHER; note = DNA nucleotide carrying a 6-amino-5-nitro-3-yl-2(1H)-pyridone nucleobase
  modified_base 25: mod_base = OTHER; note = DNA nucleotide carrying a hypoxanthine nucleobase
  modified_base order(4..5,8..9,11,13..15,17..19,22,27): mod_base = OTHER; note = 2-Prime-Fluoro modified nucleoside
  modified_base order(1..3,6..7,10,12,16,20..21,26,29..30): mod_base = OTHER; note = 2-Prime-O-Methyl modified nucleoside
  modified_base order(1^2,11^12,14^15,29^30): mod_base = OTHER; note = (1,3-dimethylimidazolidin-2-ylidene) Phosphoramidate linkage
  modified_base order(2..6,7..9,10^11,13^14,16..20,22..25,27..29): mod_base = OTHER; note = Phosphorothioate linkage
  modified_base 25^26: mod_base = OTHER; note = Mesylphosphoramidate linkage
  misc_feature 1..30: note = RM108822

SEQ ID NO: 1286 - DNA, 30 bp, synthetic construct; identical to SEQ ID NO: 29
  source 1..30: mol_type = other DNA
  misc_feature 24..25: note = DNA
  misc_feature order(1..23,26..30): note = RNA
  modified_base order(23,28): mod_base = OTHER; note = 2-Prime-O-Methoxyethyl modified 5-methyl Cytidine
  modified_base 24: mod_base = OTHER; note = DNA nucleotide carrying a 6-amino-5-nitro-3-yl-2(1H)-pyridone nucleobase
  modified_base 25: mod_base = OTHER; note = DNA nucleotide carrying a hypoxanthine nucleobase
  modified_base order(4..5,8..9,11,13..15,17..19,22,27): mod_base = OTHER; note = 2-Prime-Fluoro modified nucleoside
  modified_base order(1..3,6..7,10,12,16,20..21,26,29..30): mod_base = OTHER; note = 2-Prime-O-Methyl modified nucleoside
  modified_base order(1^2,11^12,14^15,25^26,29^30): mod_base = OTHER; note = (1,3-dimethylimidazolidin-2-ylidene) Phosphoramidate linkage
  modified_base order(2..6,7..9,10^11,13^14,16..20,22^23,24^25,27..29): mod_base = OTHER; note = Phosphorothioate linkage
  misc_feature 1..30: note = RM108823

SEQ ID NO: 1287 - DNA, 30 bp, synthetic construct; identical to SEQ ID NO: 29
  source 1..30: mol_type = other DNA
  misc_feature 24..25: note = DNA
  misc_feature order(1..23,26..30): note = RNA
  modified_base order(23,28): mod_base = OTHER; note = 2-Prime-O-Methoxyethyl modified 5-methyl Cytidine
  modified_base 24: mod_base = OTHER; note = DNA nucleotide carrying a 6-amino-5-nitro-3-yl-2(1H)-pyridone nucleobase
  modified_base 25: mod_base = OTHER; note = DNA nucleotide carrying a hypoxanthine nucleobase
  modified_base order(4..5,8..9,11,13..15,17..19,22,27): mod_base = OTHER; note = 2-Prime-Fluoro modified nucleoside
  modified_base order(1..3,6..7,10,12,16,20..21,26,29..30): mod_base = OTHER; note = 2-Prime-O-Methyl modified nucleoside
  modified_base order(1^2,11^12,14^15,29^30): mod_base = OTHER; note = (1,3-dimethylimidazolidin-2-ylidene) Phosphoramidate linkage
  modified_base order(2..6,7..9,10^11,13^14,16..20,22^23,24^25,27..29): mod_base = OTHER; note = Phosphorothioate linkage
  modified_base 25^26: mod_base = OTHER; note = Mesylphosphoramidate linkage
  misc_feature 1..30: note = RM108824

SEQ ID NO: 1288 - DNA, 30 bp, synthetic construct; identical to SEQ ID NO: 29
  source 1..30: mol_type = other DNA
  misc_feature 23..25: note = DNA
  misc_feature order(1..22,26..30): note = RNA
  modified_base 24: mod_base = OTHER; note = DNA nucleotide carrying a 6-amino-5-nitro-3-yl-2(1H)-pyridone nucleobase
  modified_base 25: mod_base = OTHER; note = DNA nucleotide carrying a hypoxanthine nucleobase
  modified_base order(4..5,8..9,11,13..15,17..19,22,27): mod_base = OTHER; note = 2-Prime-Fluoro modified nucleoside
  modified_base order(1..3,6..7,10,12,16,20..21,26,28..30): mod_base = OTHER; note = 2-Prime-O-Methyl modified nucleoside
  modified_base order(1^2,11^12,14^15,25^26,29^30): mod_base = OTHER; note = (1,3-dimethylimidazolidin-2-ylidene) Phosphoramidate linkage
  modified_base order(2..6,7..9,10^11,13^14,16..20,22..25,27..29): mod_base = OTHER; note = Phosphorothioate linkage
  modified_base 23: mod_base = m5c; note = 5-methylcytidine
  misc_feature 1..30: note = RM108825

SEQ ID NO: 1289 - DNA, 30 bp, synthetic construct; identical to SEQ ID NO: 29
  source 1..30: mol_type = other DNA
  misc_feature 24..25: note = DNA
  misc_feature order(1..23,26..30): note = RNA
  modified_base order(23,28): mod_base = OTHER; note = 2-Prime-O-Methoxyethyl modified 5-methyl Cytidine
  modified_base 24: mod_base = OTHER; note = DNA nucleotide carrying a 6-amino-5-nitro-3-yl-2(1H)-pyridone nucleobase
  modified_base 25: mod_base = OTHER; note = DNA nucleotide carrying a hypoxanthine nucleobase
  modified_base order(4,9,11..12,14..15,17,19,22,27): mod_base = OTHER; note = 2-Prime-Fluoro modified nucleoside
  modified_base order(1..3,5..8,10,13,16,18,20..21,26,29..30): mod_base = OTHER; note = 2-Prime-O-Methyl modified nucleoside
  modified_base order(1^2,11^12,14^15,29^30): mod_base = OTHER; note = (1,3-dimethylimidazolidin-2-ylidene) Phosphoramidate linkage
  modified_base order(2..6,7..9,10^11,13^14,16..20,22^23,24^25,27..29): mod_base = OTHER; note = Phosphorothioate linkage
  modified_base 25^26: mod_base = OTHER; note = Methylphosphonate linkage
  misc_feature 1..30: note = RM108826

SEQ ID NO: 1290 - DNA, 30 bp, synthetic construct; identical to SEQ ID NO: 29
  source 1..30: mol_type = other DNA
  misc_feature 23..25: note = DNA
  misc_feature order(1..22,26..30): note = RNA
  modified_base 28: mod_base = OTHER; note = 2-Prime-O-Methoxyethyl modified 5-methyl Cytidine
  modified_base 24: mod_base = OTHER; note = DNA nucleotide carrying a 6-amino-5-nitro-3-yl-2(1H)-pyridone nucleobase
  modified_base 25: mod_base = OTHER; note = DNA nucleotide carrying a hypoxanthine nucleobase
  modified_base order(4,9,11..12,14..15,17,19,22,27): mod_base = OTHER; note = 2-Prime-Fluoro modified nucleoside
  modified_base order(1..3,5..8,10,13,16,18,20..21,26,29..30): mod_base = OTHER; note = 2-Prime-O-Methyl modified nucleoside
  modified_base order(1^2,11^12,14^15,29^30): mod_base = OTHER; note = (1,3-dimethylimidazolidin-2-ylidene) Phosphoramidate linkage
  modified_base order(2..6,7..9,10^11,13^14,16..20,22..25,27..29): mod_base = OTHER; note = Phosphorothioate linkage
  modified_base 25^26: mod_base = OTHER; note = Methylphosphonate linkage
  misc_feature 1..30: note = RM108827

SEQ ID NO: 1291 - DNA, 30 bp, synthetic construct; identical to SEQ ID NO: 29
  source 1..30: mol_type = other DNA
  misc_feature 23..25: note = DNA
  misc_feature order(1..22,26..30): note = RNA
  modified_base 28: mod_base = OTHER; note = 2-Prime-O-Methoxyethyl modified 5-methyl Cytidine
  modified_base 24: mod_base = OTHER; note = DNA nucleotide carrying a 6-amino-5-nitro-3-yl-2(1H)-pyridone nucleobase
  modified_base 25: mod_base = OTHER; note = DNA nucleotide carrying a hypoxanthine nucleobase
  modified_base order(4,9,11..12,14..15,17,19,22,27): mod_base = OTHER; note = 2-Prime-Fluoro modified nucleoside
  modified_base order(1..3,5..8,10,13,16,18,20..21,26,29..30): mod_base = OTHER; note = 2-Prime-O-Methyl modified nucleoside
  modified_base order(1^2,11^12,14^15,29^30): mod_base = OTHER; note = (1,3-dimethylimidazolidin-2-ylidene) Phosphoramidate linkage
  modified_base order(2..6,7..9,10^11,13^14,16..20,22..25,27..29): mod_base = OTHER; note = Phosphorothioate linkage
  modified_base 25^26: mod_base = OTHER; note = Mesylphosphoramidate linkage
  misc_feature 1..30: note = RM108828

SEQ ID NO: 1292 - DNA, 30 bp, synthetic construct; identical to SEQ ID NO: 29
  source 1..30: mol_type = other DNA
  misc_feature 24..25: note = DNA
  misc_feature order(1..23,26..30): note = RNA
  modified_base order(23,28): mod_base = OTHER; note = 2-Prime-O-Methoxyethyl modified 5-methyl Cytidine
  modified_base 24: mod_base = OTHER; note = DNA nucleotide carrying a 6-amino-5-nitro-3-yl-2(1H)-pyridone nucleobase
  modified_base 25: mod_base = OTHER; note = DNA nucleotide carrying a hypoxanthine nucleobase
  modified_base order(4,9,11..12,14..15,17,19,22,27): mod_base = OTHER; note = 2-Prime-Fluoro modified nucleoside
  modified_base order(1..3,5..8,10,13,16,18,20..21,26,29..30): mod_base = OTHER; note = 2-Prime-O-Methyl modified nucleoside
  modified_base order(1^2,11^12,14^15,25^26,29^30): mod_base = OTHER; note = (1,3-dimethylimidazolidin-2-ylidene) Phosphoramidate linkage
  modified_base order(2..6,7..9,10^11,13^14,16..20,22^23,24^25,27..29): mod_base = OTHER; note = Phosphorothioate linkage
  misc_feature 1..30: note = RM108829

SEQ ID NO: 1293 - DNA, 30 bp, synthetic construct; identical to SEQ ID NO: 29
  source 1..30: mol_type = other DNA
  misc_feature 24..25: note = DNA
  misc_feature order(1..23,26..30): note = RNA
  modified_base order(23,28): mod_base = OTHER; note = 2-Prime-O-Methoxyethyl modified 5-methyl Cytidine
  modified_base 24: mod_base = OTHER; note = DNA nucleotide carrying a 6-amino-5-nitro-3-yl-2(1H)-pyridone nucleobase
  modified_base 25: mod_base = OTHER; note = DNA nucleotide carrying a hypoxanthine nucleobase
  modified_base order(4,9,11..12,14..15,17,19,22,27): mod_base = OTHER; note = 2-Prime-Fluoro modified nucleoside
  modified_base order(1..3,5..8,10,13,16,18,20..21,26,29..30): mod_base = OTHER; note = 2-Prime-O-Methyl modified nucleoside
  modified_base order(1^2,11^12,14^15,29^30): mod_base = OTHER; note = (1,3-dimethylimidazolidin-2-ylidene) Phosphoramidate linkage
  modified_base order(2..6,7..9,10^11,13^14,16..20,22^23,24^25,27..29): mod_base = OTHER; note = Phosphorothioate linkage
  modified_base 25^26: mod_base = OTHER; note = Mesylphosphoramidate linkage
  misc_feature 1..30: note = RM108830

SEQ ID NO: 1294 - DNA, 30 bp, synthetic construct; identical to SEQ ID NO: 29
  source 1..30: mol_type = other DNA
  misc_feature 23..25: note = DNA
  misc_feature order(1..22,26..30): note = RNA
  modified_base 24: mod_base = OTHER; note = DNA nucleotide carrying a 6-amino-5-nitro-3-yl-2(1H)-pyridone nucleobase
  modified_base 25: mod_base = OTHER; note = DNA nucleotide carrying a hypoxanthine nucleobase
  modified_base order(4,9,11..12,14..15,17,19,22,27): mod_base = OTHER; note = 2-Prime-Fluoro modified nucleoside
  modified_base order(1..3,5..8,10,13,16,18,20..21,26,28..30): mod_base = OTHER; note = 2-Prime-O-Methyl modified nucleoside
  modified_base order(1^2,11^12,14^15,25^26,29^30): mod_base = OTHER; note = (1,3-dimethylimidazolidin-2-ylidene) Phosphoramidate linkage
  modified_base order(2..6,7..9,10^11,13^14,16..20,22..25,27..29): mod_base = OTHER; note = Phosphorothioate linkage
  modified_base 23: mod_base = m5c; note = 5-methylcytidine
  misc_feature 1..30: note = RM108831

SEQ ID NO: 1295 - DNA, 30 bp, synthetic construct; identical to SEQ ID NO: 29
  source 1..30: mol_type = other DNA
  misc_feature 24..25: note = DNA
  misc_feature order(1..23,26..30): note = RNA
  modified_base order(6..7,10,20): mod_base = OTHER; note = 2-Prime-O-Methoxyethyl modified nucleoside
  modified_base order(23,28): mod_base = OTHER; note = 2-Prime-O-Methoxyethyl modified 5-methyl Cytidine
  modified_base order(16,21): mod_base = OTHER; note = 2-Prime-O-Methoxyethyl modified 5-methyl Uridine
  modified_base 24: mod_base = OTHER; note = DNA nucleotide carrying a 6-amino-5-nitro-3-yl-2(1H)-pyridone nucleobase
  modified_base 25: mod_base = OTHER; note = DNA nucleotide carrying a hypoxanthine nucleobase
  modified_base order(4..5,8,13..14,18..19,22,27): mod_base = OTHER; note = 2-Prime-Fluoro modified nucleoside
  modified_base order(1..3,9,11..12,15,17,26,29..30): mod_base = OTHER; note = 2-Prime-O-Methyl modified nucleoside
  modified_base order(1^2,11^12,14^15,19^20,29^30): mod_base = OTHER; note = (1,3-dimethylimidazolidin-2-ylidene) Phosphoramidate linkage
  modified_base order(2..6,8^9,10^11,13^14,17..19,22^23,24^25,27..29): mod_base = OTHER; note = Phosphorothioate linkage
  modified_base 25^26: mod_base = OTHER; note = Methylphosphonate linkage
  misc_feature 1..30: note = RM108832

SEQ ID NO: 1296 - DNA, 30 bp, synthetic construct; identical to SEQ ID NO: 29
  source 1..30: mol_type = other DNA
  misc_feature 23..25: note = DNA
  misc_feature order(1..22,26..30): note = RNA
  modified_base order(6..7,10,20): mod_base = OTHER; note = 2-Prime-O-Methoxyethyl modified nucleoside
  modified_base 28: mod_base = OTHER; note = 2-Prime-O-Methoxyethyl modified 5-methyl Cytidine
  modified_base order(16,21): mod_base = OTHER; note = 2-Prime-O-Methoxyethyl modified 5-methyl Uridine
  modified_base 24: mod_base = OTHER; note = DNA nucleotide carrying a 6-amino-5-nitro-3-yl-2(1H)-pyridone nucleobase
  modified_base 25: mod_base = OTHER; note = DNA nucleotide carrying a hypoxanthine nucleobase
  modified_base order(4..5,8,13..14,18..19,22,27): mod_base = OTHER; note = 2-Prime-Fluoro modified nucleoside
  modified_base order(1..3,9,11..12,15,17,26,29..30): mod_base = OTHER; note = 2-Prime-O-Methyl modified nucleoside
  modified_base order(1^2,11^12,14^15,19^20,29^30): mod_base = OTHER; note = (1,3-dimethylimidazolidin-2-ylidene) Phosphoramidate linkage
  modified_base order(2..6,8^9,10^11,13^14,17..19,22..25,27..29): mod_base = OTHER; note = Phosphorothioate linkage
  modified_base 25^26: mod_base = OTHER; note = Methylphosphonate linkage
  misc_feature 1..30: note = RM108833

SEQ ID NO: 1297 - DNA, 30 bp, synthetic construct; identical to SEQ ID NO: 29
  source 1..30: mol_type = other DNA
  misc_feature 23..25: note = DNA
  misc_feature order(1..22,26..30): note = RNA
  modified_base order(6..7,10,20): mod_base = OTHER; note = 2-Prime-O-Methoxyethyl modified nucleoside
  modified_base 28: mod_base = OTHER; note = 2-Prime-O-Methoxyethyl modified 5-methyl Cytidine
  modified_base order(16,21): mod_base = OTHER; note = 2-Prime-O-Methoxyethyl modified 5-methyl Uridine
  modified_base 24: mod_base = OTHER; note = DNA nucleotide carrying a 6-amino-5-nitro-3-yl-2(1H)-pyridone nucleobase
  modified_base 25: mod_base = OTHER; note = DNA nucleotide carrying a hypoxanthine nucleobase
  modified_base order(4..5,8,13..14,18..19,22,27): mod_base = OTHER; note = 2-Prime-Fluoro modified nucleoside
  modified_base order(1..3,9,11..12,15,17,26,29..30): mod_base = OTHER; note = 2-Prime-O-Methyl modified nucleoside
  modified_base order(1^2,11^12,14^15,19^20,29^30): mod_base = OTHER; note = (1,3-dimethylimidazolidin-2-ylidene) Phosphoramidate linkage
  modified_base order(2..6,8^9,10^11,13^14,17..19,22..25,27..29): mod_base = OTHER; note = Phosphorothioate linkage
  modified_base 25^26: mod_base = OTHER; note = Mesylphosphoramidate linkage
  misc_feature 1..30: note = RM108834

SEQ ID NO: 1298 - DNA, 30 bp, synthetic construct; identical to SEQ ID NO: 29
  source 1..30: mol_type = other DNA
  misc_feature 24..25: note = DNA
  misc_feature order(1..23,26..30): note = RNA
  modified_base order(6..7,10,20): mod_base = OTHER; note = 2-Prime-O-Methoxyethyl modified nucleoside
  modified_base order(23,28): mod_base = OTHER; note = 2-Prime-O-Methoxyethyl modified 5-methyl Cytidine
  modified_base order(16,21): mod_base = OTHER; note = 2-Prime-O-Methoxyethyl modified 5-methyl Uridine
  modified_base 24: mod_base = OTHER; note = DNA nucleotide carrying a 6-amino-5-nitro-3-yl-2(1H)-pyridone nucleobase
  modified_base 25: mod_base = OTHER; note = DNA nucleotide carrying a hypoxanthine nucleobase
  modified_base order(4..5,8,13..14,18..19,22,27): mod_base = OTHER; note = 2-Prime-Fluoro modified nucleoside
  modified_base order(1..3,9,11..12,15,17,26,29..30): mod_base = OTHER; note = 2-Prime-O-Methyl modified nucleoside
  modified_base order(1^2,11^12,14^15,19^20,25^26,29^30): mod_base = OTHER; note = (1,3-dimethylimidazolidin-2-ylidene) Phosphoramidate linkage
  modified_base order(2..6,8^9,10^11,13^14,17..19,22^23,24^25,27..29): mod_base = OTHER; note = Phosphorothioate linkage
  misc_feature 1..30: note = RM108835

SEQ ID NO: 1299 - DNA, 30 bp, synthetic construct; identical to SEQ ID NO: 29
  source 1..30: mol_type = other DNA
  misc_feature 24..25: note = DNA
  misc_feature order(1..23,26..30): note = RNA
  modified_base order(6..7,10,20): mod_base = OTHER; note = 2-Prime-O-Methoxyethyl modified nucleoside
  modified_base order(23,28): mod_base = OTHER; note = 2-Prime-O-Methoxyethyl modified 5-methyl Cytidine
  modified_base order(16,21): mod_base = OTHER; note = 2-Prime-O-Methoxyethyl modified 5-methyl Uridine
  modified_base 24: mod_base = OTHER; note = DNA nucleotide carrying a 6-amino-5-nitro-3-yl-2(1H)-pyridone nucleobase
  modified_base 25: mod_base = OTHER; note = DNA nucleotide carrying a hypoxanthine nucleobase
  modified_base order(4..5,8,13..14,18..19,22,27): mod_base = OTHER; note = 2-Prime-Fluoro modified nucleoside
  modified_base order(1..3,9,11..12,15,17,26,29..30): mod_base = OTHER; note = 2-Prime-O-Methyl modified nucleoside
  modified_base order(1^2,11^12,14^15,19^20,29^30): mod_base = OTHER; note = (1,3-dimethylimidazolidin-2-ylidene) Phosphoramidate linkage
  modified_base order(2..6,8^9,10^11,13^14,17..19,22^23,24^25,27..29): mod_base = OTHER; note = Phosphorothioate linkage
  modified_base 25^26: mod_base = OTHER; note = Mesylphosphoramidate linkage
  misc_feature 1..30: note = RM108836

SEQ ID NO: 1300 - DNA, 30 bp, synthetic construct; identical to SEQ ID NO: 29
  source 1..30: mol_type = other DNA
  misc_feature 23..25: note = DNA
  misc_feature order(1..22,26..30): note = RNA
  modified_base order(6..7,10,20): mod_base = OTHER; note = 2-Prime-O-Methoxyethyl modified nucleoside
  modified_base order(16,21): mod_base = OTHER; note = 2-Prime-O-Methoxyethyl modified 5-methyl Uridine
  modified_base 24: mod_base = OTHER; note = DNA nucleotide carrying a 6-amino-5-nitro-3-yl-2(1H)-pyridone nucleobase
  modified_base 25: mod_base = OTHER; note = DNA nucleotide carrying a hypoxanthine nucleobase
  modified_base order(4..5,8,13..14,18..19,22,27): mod_base = OTHER; note = 2-Prime-Fluoro modified nucleoside
  modified_base order(1..3,9,11..12,15,17,26,28..30): mod_base = OTHER; note = 2-Prime-O-Methyl modified nucleoside
  modified_base order(1^2,11^12,14^15,19^20,25^26,29^30): mod_base = OTHER; note = (1,3-dimethylimidazolidin-2-ylidene) Phosphoramidate linkage
  modified_base order(2..6,8^9,10^11,13^14,17..19,22..25,27..29): mod_base = OTHER; note = Phosphorothioate linkage
  modified_base 23: mod_base = m5c; note = 5-methylcytidine
  misc_feature 1..30: note = RM108837

SEQ ID NO: 1301 - DNA, 30 bp, synthetic construct; identical to SEQ ID NO: 29
  source 1..30: mol_type = other DNA
  misc_feature 24..25: note = DNA
  misc_feature order(1..23,26..30): note = RNA
  modified_base order(6..7,10,20): mod_base = OTHER; note = 2-Prime-O-Methoxyethyl modified nucleoside
  modified_base order(23,28): mod_base = OTHER; note = 2-Prime-O-Methoxyethyl modified 5-methyl Cytidine
  modified_base order(16,21): mod_base = OTHER; note = 2-Prime-O-Methoxyethyl modified 5-methyl Uridine
  modified_base 24: mod_base = OTHER; note = DNA nucleotide carrying a 6-amino-5-nitro-3-yl-2(1H)-pyridone nucleobase
  modified_base 25: mod_base = OTHER; note = DNA nucleotide carrying a hypoxanthine nucleobase
  modified_base order(4..5,8,11..12,14,19,22,27): mod_base = OTHER; note = 2-Prime-Fluoro modified nucleoside
  modified_base order(1..3,9,13,15,17..18,26,29..30): mod_base = OTHER; note = 2-Prime-O-Methyl modified nucleoside
  modified_base order(1^2,11^12,14^15,19^20,29^30): mod_base = OTHER; note = (1,3-dimethylimidazolidin-2-ylidene) Phosphoramidate linkage
  modified_base order(2..6,8^9,10^11,13^14,17..19,22^23,24^25,27..29): mod_base = OTHER; note = Phosphorothioate linkage
  modified_base 25^26: mod_base = OTHER; note = Methylphosphonate linkage
  misc_feature 1..30: note = RM108838

SEQ ID NO: 1302 - DNA, 30 bp, synthetic construct; identical to SEQ ID NO: 29
  source 1..30: mol_type = other DNA
  misc_feature 23..25: note = DNA
  misc_feature order(1..22,26..30): note = RNA
  modified_base order(6..7,10,20): mod_base = OTHER; note = 2-Prime-O-Methoxyethyl modified nucleoside
  modified_base 28: mod_base = OTHER; note = 2-Prime-O-Methoxyethyl modified 5-methyl Cytidine
  modified_base order(16,21): mod_base = OTHER; note = 2-Prime-O-Methoxyethyl modified 5-methyl Uridine
  modified_base 24: mod_base = OTHER; note = DNA nucleotide carrying a 6-amino-5-nitro-3-yl-2(1H)-pyridone nucleobase
  modified_base 25: mod_base = OTHER; note = DNA nucleotide carrying a hypoxanthine nucleobase
  modified_base order(4..5,8,11..12,14,19,22,27): mod_base = OTHER; note = 2-Prime-Fluoro modified nucleoside
  modified_base order(1..3,9,13,15,17..18,26,29..30): mod_base = OTHER; note = 2-Prime-O-Methyl modified nucleoside
  modified_base order(1^2,11^12,14^15,19^20,29^30): mod_base = OTHER; note = (1,3-dimethylimidazolidin-2-ylidene) Phosphoramidate linkage
  modified_base order(2..6,8^9,10^11,13^14,17..19,22..25,27..29): mod_base = OTHER; note = Phosphorothioate linkage
  modified_base 25^26: mod_base = OTHER; note = Methylphosphonate linkage
  misc_feature 1..30: note = RM108839

SEQ ID NO: 1303 - DNA, 30 bp, synthetic construct; identical to SEQ ID NO: 29
  source 1..30: mol_type = other DNA
  misc_feature 23..25: note = DNA
  misc_feature order(1..22,26..30): note = RNA
  modified_base order(6..7,10,20): mod_base = OTHER; note = 2-Prime-O-Methoxyethyl modified nucleoside
  modified_base 28: mod_base = OTHER; note = 2-Prime-O-Methoxyethyl modified 5-methyl Cytidine
  modified_base order(16,21): mod_base = OTHER; note = 2-Prime-O-Methoxyethyl modified 5-methyl Uridine
  modified_base 24: mod_base = OTHER; note = DNA nucleotide carrying a 6-amino-5-nitro-3-yl-2(1H)-pyridone nucleobase
  modified_base 25: mod_base = OTHER; note = DNA nucleotide carrying a hypoxanthine nucleobase
  modified_base order(4..5,8,11..12,14,19,22,27): mod_base = OTHER; note = 2-Prime-Fluoro modified nucleoside
  modified_base order(1..3,9,13,15,17..18,26,29..30): mod_base = OTHER; note = 2-Prime-O-Methyl modified nucleoside
  modified_base order(1^2,11^12,14^15,19^20,29^30): mod_base = OTHER; note = (1,3-dimethylimidazolidin-2-ylidene) Phosphoramidate linkage
  modified_base order(2..6,8^9,10^11,13^14,17..19,22..25,27..29): mod_base = OTHER; note = Phosphorothioate linkage
  modified_base 25^26: mod_base = OTHER; note = Mesylphosphoramidate linkage
  misc_feature 1..30: note = RM108840

SEQ ID NO: 1304 - DNA, 30 bp, synthetic construct; identical to SEQ ID NO: 29
  source 1..30: mol_type = other DNA
  misc_feature 24..25: note = DNA
  misc_feature order(1..23,26..30): note = RNA
  modified_base order(6..7,10,20): mod_base = OTHER; note = 2-Prime-O-Methoxyethyl modified nucleoside
  modified_base order(23,28): mod_base = OTHER; note = 2-Prime-O-Methoxyethyl modified 5-methyl Cytidine
  modified_base order(16,21): mod_base = OTHER; note = 2-Prime-O-Methoxyethyl modified 5-methyl Uridine
  modified_base 24: mod_base = OTHER; note = DNA nucleotide carrying a 6-amino-5-nitro-3-yl-2(1H)-pyridone nucleobase
  modified_base 25: mod_base = OTHER; note = DNA nucleotide carrying a hypoxanthine nucleobase
  modified_base order(4..5,8,11..12,14,19,22,27): mod_base = OTHER; note = 2-Prime-Fluoro modified nucleoside
  modified_base order(1..3,9,13,15,17..18,26,29..30): mod_base = OTHER; note = 2-Prime-O-Methyl modified nucleoside
  modified_base order(1^2,11^12,14^15,19^20,25^26,29^30): mod_base = OTHER; note = (1,3-dimethylimidazolidin-2-ylidene) Phosphoramidate linkage
  modified_base order(2..6,8^9,10^11,13^14,17..19,22^23,24^25,27..29): mod_base = OTHER; note = Phosphorothioate linkage
  misc_feature 1..30: note = RM108841

SEQ ID NO: 1305 - DNA, 30 bp, synthetic construct; identical to SEQ ID NO: 29
  source 1..30: mol_type = other DNA
  misc_feature 24..25: note = DNA
  misc_feature order(1..23,26..30): note = RNA
  modified_base order(6..7,10,20): mod_base = OTHER; note = 2-Prime-O-Methoxyethyl modified nucleoside
  modified_base order(23,28): mod_base = OTHER; note = 2-Prime-O-Methoxyethyl modified 5-methyl Cytidine
  modified_base order(16,21): mod_base = OTHER; note = 2-Prime-O-Methoxyethyl modified 5-methyl Uridine
  modified_base 24: mod_base = OTHER; note = DNA nucleotide carrying a 6-amino-5-nitro-3-yl-2(1H)-pyridone nucleobase
  modified_base 25: mod_base = OTHER; note = DNA nucleotide carrying a hypoxanthine nucleobase
  modified_base order(4..5,8,11..12,14,19,22,27): mod_base = OTHER; note = 2-Prime-Fluoro modified nucleoside
  modified_base order(1..3,9,13,15,17..18,26,29..30): mod_base = OTHER; note = 2-Prime-O-Methyl modified nucleoside
  modified_base order(1^2,11^12,14^15,19^20,29^30): mod_base = OTHER; note = (1,3-dimethylimidazolidin-2-ylidene) Phosphoramidate linkage
  modified_base order(2..6,8^9,10^11,13^14,17..19,22^23,24^25,27..29): mod_base = OTHER; note = Phosphorothioate linkage
  modified_base 25^26: mod_base = OTHER; note = Mesylphosphoramidate linkage
  misc_feature 1..30: note = RM108842

SEQ ID NO: 1306 - DNA, 30 bp, synthetic construct; identical to SEQ ID NO: 29
  source 1..30: mol_type = other DNA
  misc_feature 23..25: note = DNA
  misc_feature order(1..22,26..30): note = RNA
  modified_base order(6..7,10,20): mod_base = OTHER; note = 2-Prime-O-Methoxyethyl modified nucleoside
  modified_base order(16,21): mod_base = OTHER; note = 2-Prime-O-Methoxyethyl modified 5-methyl Uridine
  modified_base 24: mod_base = OTHER; note = DNA nucleotide carrying a 6-amino-5-nitro-3-yl-2(1H)-pyridone nucleobase
  modified_base 25: mod_base = OTHER; note = DNA nucleotide carrying a hypoxanthine nucleobase
  modified_base order(4..5,8,11..12,14,19,22,27): mod_base = OTHER; note = 2-Prime-Fluoro modified nucleoside
  modified_base order(1..3,9,13,15,17..18,26,28..30): mod_base = OTHER; note = 2-Prime-O-Methyl modified nucleoside
  modified_base order(1^2,11^12,14^15,19^20,25^26,29^30): mod_base = OTHER; note = (1,3-dimethylimidazolidin-2-ylidene) Phosphoramidate linkage
  modified_base order(2..6,8^9,10^11,13^14,17..19,22..25,27..29): mod_base = OTHER; note = Phosphorothioate linkage
  modified_base 23: mod_base = m5c; note = 5-methylcytidine
  misc_feature 1..30: note = RM108843